United States Patent Application Publication US 2021/0283234 A1 - sequence listing, part 3

SEQ ID NO: 1 - DNA, 4846304 bp, Artificial Sequence (residues 3,230,871-4,846,304 of 4,846,304)
  GenBank No.: CP015157; Salmonella enterica subsp. enterica serovar Typhimurium strain NC983 chromosome, complete geneome
agcgctaaccccattatgttgacgttaaatcaggtcgcttatcgctggccggatgccgcagccgactgtttgcacgctatctcgcttaaacttcgtgacggcgaatggctggcgttgaccggcgataacggcgcgggaaaatcaacgctgttacggattatggccggcctgctttcccccgcttccggctcggtaacgcttaatggagagccgattgcgcagcttaaaaatcgtcaacgcgccgccgctatcggcgtactctttcaggaagcggaaaaccagattttccacagcaatgtcgcgcaagaggtcgcttttgggctgaaactacaacgcttatcggcggaggaaatttcacggcgcacgcaggccgcgctgcggttatgccagctaacggacgtcgccgaggcacacccgcttgatctgcacgccgcacagcgccggatggtggcggtcgccagtctggaggcgatagcgccgcctgtgttattgctggatgaacccagccgggattttgacgcccactggctaaccgtatttgaacactggctggcgacatgccgggcacggggaaccagcgtcgtcgcgattagccatgacgctgcgtttacccggcgtcatttttcacgggtggtacggctggaaaacggcaggttgtcaaagggagaataaaaaacgggtcgccgaagcgacccgttttatgccgtattaaggattacagcagtgctttcgctttggcgatcacgttgtccaccgtgaagccaaactcttcaaacaacagctctgccggagcagactcaccgaaggtggtcatcccgacaatagcgccgttcaggccgacgtatttgaaccagtagtcagcgatacccgcttcaatcgccacacgcgcagagaccgccttcggcagcacggattcacggtaagccgcatcctgcttgtcgaacgcgtcggtggacggcatggaaaccacgcgcgccttcacgccttcggcagtcagtttttcgtaagcggcaaccgccagctcaacctctgaaccggtcgcaatgaagataatctgcggctggcccgcacaatctttcagtacgtaaccaccgcgggcgatattcgccagttgctcttcagtacgttcctgctgcgccaggttctgacgggagaggatcagcgcggttgggccatcctgacgctctacgccatatttccacgccaccgcggattccacctggtcgcacggacgccatgtggacatgttcggcgttacgcgcaggcttgccacctgctcgaccggctggtgcgtcgggccatcttcgcccagaccgatggagtcgtgggtgtacaccatcacctgacgttgtttcatcaacgctgccatacgcactgcgttacgggcatattcgacgaacatcaggaaggtggaggtgtacggcaggaaaccgccgtgcagggcgataccgttggcgatagcggtcataccgaattcgcgcacaccgtaatgaatgtagttacctgcggcatcttcgttaatcgctttcgaaccggaccacagggtcaggttagaaggagccaggtcagcggagccgccgaggaattccggcaacagcggaccgaaggcttcgatggtattctgggacgctttacggctggcgattttggatggattcgcctgcagtttagcgatgaactcattcgctttcgcatcgaagtcagccggcatgtcgcctttcatacgacgagtgaattcagcagcttcctgcgggaaggctttctcataagccgcgaatttctcattccatgcagactctttcgcctggccggcttctttcgcatcccactgggcgtagatttcagacgggatttcgaacggcgcgtatttccagcccaactgttcgcgggtcagcgcgatttccgcgtcgcccagcggcgcgccgtgggaatcgtgggtaccctgtttgttcggcgaaccgaaaccgatgatggttttgcacatcagcagggacggtttgtcagtcacggcgcgagcttcttccgtggcgcgtttaatggcgtcggcatcgtgaccgtcaatgccacggataacgtgccagccgtaggcttcaaaacgtttcgcggtgtcatcggtgaaccagccttcaacatgaccatcgatagagataccgttgtcatcatagaacgcgatcagtttgcccagtttcagagtaccagccagagagcacacttcgtgagaaatgccttccatcatgcagccgtcgcccataaagacgtaggtgaagtggtcaacgatatcgtggccaggacgattaaactgcgccgccagagttttctcggcaatcgccatcccgacggcgttggcaataccctgacccagcgggccagtagtggtttcaacgccagcggtgtagcccacttccgggtgaccaggggtttttgaatgtagctgacggaaattctgcagctcggacatcggcaggtcataaccggtgaggtgcagcaggctgtaaatcagcattgagccgtggccattggacagcacgaagcggtcgcggtcggcccaggacgggttggtcgggttgtggttcaggaaatcacgccacaggacttcggcaatgtcagccatacccatcggggcacccgggtgaccggacttggctttctgtactgcgtccatgctcagcgcacgaatagcattggcaagctctttacgtgaggacattttgactccagatcggatgttgaaaggccatgcccgtaacgacttgacgacagcgcgttttgggctacgccggaaaatttgccaacaatttaccccaagccgcgcgtcatgtacatggaacatccttttaccgcttcagaaatctccggatcatgctcgtatgttgcgcaattagctaacttgcctgccatgcttttctttatacttaacccaggcgctaattcatctgcaacgggcgcatttcaaaataatattgattcgtatggaagagaaaaatgaaaattcgcgctttactgcttgctttgggcatggcgacggtgctgaccggttgccagaatatggactctaatggactgctttcttcgggcgctgaagcttttcaggcctatacgttaagcgatgcgcaggtaaaagcgttgagcgatcaatcctgtcaagagctcgacagtaaagcgaaaatcgcgccggcgagcagcgaatacactaaacgactggcaaaaattgccgccgcgctgggggataacattaacggccagccggtgaactataaggtttacgagacgaaagacgtcaacgcgtttgccatggcgaacggttgtatccgcgtctacagcggactgatggatatgatgaccgacaacgaagttgaagccgtgatcggccatgaaatgggccatgtcgcgctgggtcatgtaaagaaagggatgcaggtcgcgctgggcactaacgccgttcgtgttgcggcggcatcggcaggaggcgtagtcggcagcctgtcgcaatcacagcttggcgatcttggcgaaaaactggtgaactcgcagttctctcagcgtcaggagtccgaagcggatgattattcttacgatctgttgcgcaaacgcggtatcagtccggcaggactcgccaccagctttgagaaactggcaaaactggaagcgggtcgtcaaagctcgatgttcgacgatcacccggcgtccgccgcacgcgcacagcatgtgcgcgatcgtatgagcgcggacgggatcaaataatccccgaacagtgccggatggcggcgtgaacgccttatccggcctacaagcatcaatcagctgtaggccggataagcgcagcgccatccggcaaaacaacttactcgcccttcttcgccgcctggatatagagcatttctaatgccagcgtcgcggccgccagagcggtgatctccgactgatcgtaagccggcgcgacttccactacatccataccgacaatgttcagatctttcagaccgcgtaccagtttaatggcgcgatcggaggtcaaaccgccgatcaccggcgtaccggtgccaggcgcaaacgccgggtccagacagtcgatatcaaaggtcagatagaccggcatatcgccgacgatctgtttcacctgagcgagaatatcatccacgccgcgatcgttgacctggcaggcatccagcacggtaaagccattgtctttgtcaaactcagtacgaataccgatctgtaccgaatgatgcggatcgatcaggccttctttcggcgcggtgtagaacatcgtgccgtgatcgaattcgcagccgttagcgtaggtatcggtatgcgcatcaaaatgtaccagcgccattttgccaaaatgtttcgcgtgggcgcgcagcagcggcagcgtgacgaagtggtcgccgccgaaagagagcatacgcttgcctgcagacagcagtttttcagcgtgcgcctgtaatttttcgctcatttcacgggcatcgccaaacgcatacaccaaatcgccgcagtccacgacgttcaggcgctcgcgcatgtcaaaattccacgggaaacggtgatgttcccaggcaaggttggtcgacacctgacggatcgccgccgggccatgacggccgccagcgcgaccggacgttgccatatcaaacggtacgccagtgatcacccagtcggcatcgctgtcatacggctggaagttcattggcagacgtaaaaaaccaaacgcattagaaaccagtgagttatcgtactgatgacctaaggtgctcatggcaaaaacctcttcttagtcaatataaaaaaaccctcccgcgtcgttaggcccgacgaggaagggtttgaatttgtttacggctcaaagtttactctgacagaccgcattattgaagtcagtttagccaggtacagtagacaacgcccgaaaaaaatatatatccagcgcaaatcagtaggctcatacgtccatcgcggtcagttaagaggccttagggatttgccgctgtaaaaactcaagcactaatgcgtaaaacagcggtgtttttcctggcgtctggaaaatggcgtgaccgctaccgggaatgagggtcatctccgcctgaggcagcagccggtacagctcggtaacttcttcaacggtgaaaaattcatcccggtcgccgtccagtaatagcacaggaatgtggatttttttcacctcttcttccgccagcgatgtgggcgttgtccacattggccagacacctttgaggaacgtgcgccagtagtctttttgctctggatgatgcatgttctgataaaatttaaccatcccgggcgcatccgaagccattttatccagatcgcgatccgtcaattgcccctgaggcattcctttaccataaaaaatttccatcccctgcatgtaatgggtcgtagcaaagcgatgcgttgcgccgccgacgatagcagcgcgcgctagatccgggtatcggctggttaacttcagaacgaccatgccgccatcgctgtaacccatcaccagcggtttttccagcttcagcgctttaacaaaagccgccatatcttccgtcatcagatcatagctaaacgttccttgcgggttattggttaatccatgtccacgactgtccggcatgatgacgcgaaaatatcgagatgcctctttcgctaatccctgccaacttttcgccgtcagaccaccaccgtgaatcaacagcagcggaggcccctcgccctcttcaacgtaatgaattttgataccattcgcttccacaaatttatctttgtccatcgttgttgctgaagcatttattaaaaatataatattgataataaaaataaatgctaatttaaaaatatgattcataacacctcgccaatcactttccgtgtaaaagaccatattattcagattgaacaaaaataacatcaaaatcgatttgtatcattttcacttatttaccggggagaccccgcatcctctttttacagaacgtaaaaagcctttccgcgattaaccccaacgcgaaaaggctctgaagtcagaaaagtgccaccttattcattctggctgtaattcaggatgacttgaaggtctcttcctgaattgcatttagcgctttctttattccttcgcctgacaagactagcttgactcgctaaatgccgtggccggaattttcacaatcgcttttttaaccggcgcaggtttaccacgcgtacaaagcggacggtggacctggttgggataaaaaagcgcgaaatcgccaggatttaatgtaacgaactgctcattagcgacacattcaggaaagatgatgtcatcaggaagatgctcaagctcctttatcctggtatcaattttgttggaatagccaatctcctcataaccgcttagtaaaatctgaacatcgatatattttttatgaagttcagctttgcggtttaacgaagagtgtgtttctccttcgcttatcataagaaatgactccgggaaagaaagttcatatctaccagcaggctgatcttcagctatcttcaccgcttcgatgataagttttttaataatgtggttaacgtaaggtaataaagtaagctgctctatatttccatatagcatactatagttatcctaaataatggtcgtgattataattatcagccaatcaggtactggtaaataccttcagccacaggaataccttcttttaaacatttttctttataggcgatttgcggatcgtttggcgccagcactttatcaacaccgggcatcggttttacagcccttagctcattgaccattgtgctcattattgaggaaaacagcggattgcccaacatctgcggatcaataacgataaccagactcgctaacttgcgcatcttgtcatagtcgccatacatccgaacaatatggttgctaaagtttgcccccatcaggacgcccgtgagcgcatcaatcgccagggcaataccagaacctttgtgtccgccaaagggcagcagattttcaattttatgcggatcggtagtgatatgtccctctttatccagcgccagaccatgacctattggtttcccggtttctttggcgtgcagaattttaccaaacgcaatggcgctggtcgccatatcgacgatcatcggatggctgtctttaacggggaagccgaaggcgattgggttagtccccagaaagcgctccgcgccgccatacggcgcaacacaggtatccgtttgcgtcatggcgatagccaccattccctggcttgtcgcctgctcaatgaaccacgagagcgcgccgcagtgggacgtatttttgacgctgacgaaacccagccccgtctctctcgccagactaatagcgtgatctgtcgcctttatcagcgcgcagtgtcccattccatcatcagagtccagaatagcgactgaaggcgaaatctgttcgatgctgaatgttgcttttggattgagcccgcctgcgttcaggcgggtacaatagtgctctacgcgaataacgccgtgggagtgaacgccggtaatatcggcatgaaccaaaacgtcggctacctgctgcgccgtttgcgcgtcaagacccgcctgggtgagtttattaaacgccagcgctttcaattcattttctttgactaatattgttgacataactatcccgctattaaaatttgataacgcctttaaccaattttttgttttctaccacgttcttctggtactggttgccgaacgtatagaaatcgaattcctggtttttcatcattgtttcgctaatagcgccctgagccattagctcaatgacacattcgaagtcttcccgcgtcgcgttacggctgctcaatagcgtggtctcttttttatggaaggtcggatcgtcaatgacgagctcgccgatatacagcccgatgaagacgatttttccgccgtgacgaatcagatcgacagcgcggctcatggaggatttattgccggtggcatcaagcacagtgccggctaattcaccggagaaacaggctttcagcgcatcaatatagtcgtctgacgacggatcgagcgttgcaacgcctaccttttcggcgaccagacgacggcgttcggcgtcaatatcagctaccgcgacgcgagcgcctttggcttttgctatcgcggcggcggccagcccaatcggcccggcgccgaccaccacaatgttttgctgcggcttcacgtcagcgcggcgtactgcatgggcgctgatggcgaaacactcaaccagcgcgcccgcgctgtcagtgaggttatccgacagttcaaccagattttgttcacgaacggccagatattcgctaaagccgccgtcctggtgaacaccatacagcgagacgttctcacagcagttggtttttccttcccggcaggctgcgcaagcgccgcaaggaatacagggaataacgctatagcgttggccgaccttcgccgtgctgcacgatttacctaacatttcagccacgccgcaaatttcatgacccagcacgcgcggataggcaaaaaagggctggcgaccggcaaacgcatggatatcggtgccgcaaataccaaccgctttaatttttaacagtacttcatcgtcttttaaatgaggaatatccctttcaatgtattcgatatttcccggattattacagataagcgttttcatacttaaccctttgaagataaacggtgaatggtggccgtgacgccatgtaattcaatatggttaaaggcctgctgaatgttgtttaaaaagtctgcgttgtcgctggccagcgttccaaagatgctatttatctgcagcaaagacagcgcttgttcccatcgcgtgtttttatttttaatagccgcattgaaggtatcattgagcgggtcggccacgctctgcccctgagagagcgtattaatgacgtaatggagccagcccgcaatcagcgtcgctaacgccctgcccttaacaccgcgcgcctggagcgtcagataaggatcgacggcccgctgaggcagcttctgagaaccgtccatcgcaatctgtccggtcttatgtttaatattcgggttgctgaatcgatcaatgagcaactgcgcatattgatgtacatctaccgccaaattcgggcgcagcgattttgcctgctcttccgtcattaaatgatgtacggcggttttaaaagcgtcgtcttccatgcactgatagataaactcatatccggccaggctgccgttataggcgagaaacgaatggctgccattcagcatacgaagtttcatttcttcatagggaagcacgtccgagacgaacatcgcccctgctttatcccagtcaggacgaccggcaacgaaattatcttcgataacccactgacggaaatcctcgcatacgatgccgcagggatcggcaaaaccgatctggtctttaatcatgtcaaattgctctggcgtcattgccggcacgatgcgatcgaccatggtgccaggaaaggtgacatgcttcgctatccaggccgccagttgcggatcgagattatcggcaaacgtaacgatcgccgttttggtcaaatgaccgttttccggaatgttatcgcacgacagtacactaaacgggggaagcccttgctggcggcgtatccgtagcgcttcgacgatcagtccgagtgctgaccggggatgttcaggatcggcaagatcgtgtttgatgagcggatggctgagatcgagcgttctggaccgtggatcggtgcagtaacctttttccgttatcgtcaacgaaacaatttttacctgcggctcagtcagcttctcgatcgccgcctgaatacctgacttcggcgtatgcaacgcgccggtgatggtacgaaccaggcgactattgatggcgctggctgacgtttccaccactgaaaacagcccctgttgcgcatttagcgcatccaccagctccgcatcgccgaacagattcagttcaaaaatcccccagcggttgccggttatctcattcgtgagatcgttataaacagcctgatgaccacggtgaaaggcgccaaatccaatatgtacgatgttggcttccattccctgacgtgaataagtcgttttgaattggtgccttgcggcgtctaactggcgagctatggtgtccatgaatttttcccactcctgttttgtttaccaattctgcttaaacaccataccaaaatccgtgaatatgatcacactcatggcaccagattctttaccatggtatgctgactaatagccaatgaataaaaataatttatttatcaattagttataaaaagcacttctcaggataaattttacgattcacaaaagcgtgattttgattagaaaaatcggccacaaattggcataccacccatacaacccgtaatcattaaaccacatgaaaaacaatatcttattgaataacacgcccgctgcaagtgtatatgtcacgcatgattggttcaataatcacccgaaatacagcaaaccaaacctgataatttgtctagtgaattaatgaactcaatttattatcagcatcaacattaacctaagaacatcagttacggttttgatcatccgggtcgctgctaaagcgatgaggagtgagccgcctttagacgtaattggcaaattaatccattgatttaaaacaggaaaaaattgatgaagacgcggattaggcacgttgaaacaaagctttcaaagcccctctggccgaggtcttagttgacgtgaaacatggcataatagccatttcgaactggtaaccacgacgattacgctggaagacggttcaactggcaccggatatacctataccggcggaaagggagggtatgcaattaaagcgatgatcgaccacgatcttgccccggtactgtcagggaaagaggcgctgcgattgacgatatctatgactttatggaatagcatattcactatgtgggttgcggaggcatcgcgtcgtttgcgatgtctgcgatgtctgcggtggatatcgccctttgggatttgaaaggcaaacgtgaaaaactgccgctgtggaaaatggctggttgaaggcggcgcgtctgtcgacgaatagcggtcgtttggtatgctcgctcggtatgcaggaattacacgtcagactggtttccgcattcgagactggctgactggaggttcacagtttcccaatcgatcaatataccaaacatccgctggtggtcgacaattatcgcgccgtggcaccggacacctacggcattggcgtagagtttgactgggataagctgagcgtttacgaagcctgattccctctctccgggcttgtttttggcggcaggcccggttaatcgctgacaaaaatgtcatccgcctgaaaatagccgtcaggtggcgaagaaaaaatcatcaaaatcttccagcgaatcatcctgttggaagatttttaccagctcatttttactgttttcaagatgggtccacgaagcctgtctggcctgctcagcatcgcgtttttgcaatgcaaggaagatactacggtgatcttccacccatttcattcttaactctttcttatgtaaatacttatagtttaactgcttccagcgcggattttcggtcctgacagcccgccacagctcggcagattgtttcattaatacacgattttgcgtggattccgcgatgatattgtggaactggcgatccagttcttcaaatttgtcgctgtcgccgccaatctgcttttcctgctgctcaataatacgtttaagctgcttaagttcattaaatctgatttgcgtagcggcaaaaccggtgatgttactttcgatgacctgccgggcctgtagcaattcaaaggggccaatgtctgagtaaggcaagagcgctttttgattgattttttccagactatcaataaagtaagtgcctgcgccttgcttaacctctaccactcccttcagctcaagcataataatcgcctcacgaatcgtcgtgcggctggtttgaaaacgctcgctgagttctctctccgccggaagtcgctcgccagctttaaatacccctgaatagagtagttcttctatttgcagccctatatcaaaatagcgccgcttggttaaaatttgttccatgcacatacctatgtagacagcaattgctccacttgagggtagtgtaaacaaatcctaatgtttatggtaaacaatttccctgccagagagtggtcgtttctttcccgcaacctacggctatgcgcgtcacacagtccttccccaccagactcggcaggaaaggtgctgattcccataacgcatatttgacgtttgatgccgggtttatttgcggcagggcggcggcgcatacccgttgttgtccgccgggaaagcctgcgaggaacaaggcggtagcgtatttgttgctttaccctgcaatgcaaaagcggcaaagccgatgacgccgatgttgcgtacatcgccctgcgcggagtgggccgcataagcgtcagctacgtcggcgaactggaatgccgcctcagtgtgtttatctttgcgaaaccctttaatcgccagtgaatcgccggcgttaacaatatagccatgatgattcagcgagcctgcttttccgttcaacacgtccaggccatcaaccgttgcgacgatttcgtaattggtatcatgactgtaattacgaatatataactgatagttcatccctgatcttgcaggaatactatattgccattgtcccattgatgcgttgtagcgacgagtaattggaatcgaattaaaattagcgtcgcgcacagcatattcaagatcgctgatacgtatactataaactttatcgtaacctgacggatattgagtggagtaatttattatcaccatttcggcaggttctcgatcggcacgttctaccgaaacgctttgtaccgatgaatgcacgtcgccgccccaagcggtgccgacgtcggatgaagagccattattagattgcattccgctggaacaaccgcctaacagcaaaaacaagccaacaatgacggcattaaatttaaatttgctcatactcacccccctttttaattattagggggattgtaggcccataagattacatagagaagcgacgcgctgataattaagaatttataaaatataaaagggtcgatttaaataattaaatcgacccacaagtggaatactcttaattactcatcttcaagataagtataaccgtacagtcccgcttcaaattcctcaaggaactgctgctgcaacgcatcgtccagatccgtctgttttacctggtcgcggaaatgcattaacagcgttttcggatccagttgcacatattgcagcatatccgcaacggtatcgccttcgtccgacagttcaacctcgacgctaccatccgggaagacaaacacgtcaaccgcttcagtatcgccaaacaggttgtgcatgttaccgaggatctcctgataggcgccgaccataaagaagccgagcatcggtggattctctggatcgtattccggcatcggcatcgtcgtggcgataccgtcgccatcgatatagtggtcgatagcgccatcggaatcacaggtaatatccagcagcacggcacgacgttccggtacctgatctaacccttccagcggcagcaccgggaagagctgatcgattccccacgcgtccggcattgactggaacagcgagaagttgacgtacattttgtccgccattcgctcttgcagttcgtcgataatcggacgatgcgcacggttttgcgggtccagttgcttctgcacttcatggcacatgctgagataaagttgctccgcccaggcgcgctcctgcaaactaaacgcgccggaagagtagccgatatgaatatcgtgcagatccatttggctatcatgcagccattcacgcagcgagcggcgagtgccaggcttatgcatctcctgccaggtttcccacagattttgcagcgcacgcggcgcatcttcagcaggggcagtcggatccgtgtattcgttacgctccacgccgataatgttagagaccagtaccgtatggtgcgcagtgacggcgcggccagactcggtaatcaccgtcggatgcggtaaaccatgctcttcgcaggcatcgccaatcgcccagatgatgttattggcatattcgttcaggccatagttcaccgaacagtcggactgcgagcgggtaccttcataatccacgcccagaccgccgcccacgtcgaagcactggatattcacgcccagcttatgcagctcaacatagaaacgcgcggactcgcgcacgccggtcgcgatatcgcgaatgttcgccatctgcgatcccaggtggaagtgcaacagttgcagactgtccagacgcccggcgtcacgcagggtctccaccagttgcagcacctgcgtcgccgccaggccgaattttgatttttcgccgccggaggattgccacttaccggacccctgagaggccagacgcgcacgtacgcccagacgaggaaccacgttcaggcgctcggcttcttccagcacaatcgcgatttcagacatcttttcgatgaccagataaaccttatggcccatcttctcgccaatcaacgccagccgaatgtattcacggtctttataaccattacagacgattacgctacgggtcatgccggcatgcgccagcaccgccatcaattccgcttttgaccccgcttccagccccaacggttcaccggaatggataagggactcgatcacgcggcgatgctgattgaccttaatcggataaacgaggaagtagtcgccgttataaccgtaagattcacgcgcacgcttaaacgccgcgttaattgaacgcaaacggtgttgcaggatctgcgggaagcaaaacagcgccggcagacgctgaccttgcgcttcgcgcgctttcaccagtttggcaagatcgacacgcgcttccggtacgtcgggatcggggcatacgctaatatggcccagctcgttgacgtcgtagtagttattgccccaccaggcaatattgtaagtgcgcagcatcttgctggcttcctgggagctcattgcaacctcctgcatggagcgtagtacaccctgttcgcctgctgacgaaggcgaacccatagacatgtcgtcagacatagcgaacctcaatttttattagcaagtgtaaaacagttgactactatcgcaatccgaagacgcgataacaacccatagacaagcggattttccagcagatagcgctgatgctccgcctgcgcgaccggtttctttttcatatcattgtaaacacgtaaccgaactcacagataacggttcggcgaaaccacgagaaaactcttgcgttaacaagagcgcccttgttcagtcttcagcgccattgccggctctggaatcctgagaagcgccgagatgggtataacatcggcaggtatgcaaagcagagatgcagattgcgggggacatgcgcgcaccagaacgatgcgacagattcagcagaatacaacggttcattatctcgtatcacctccacggccgcctcgtaagacgaacccacaagccaaagcaacgttttaacccggctggaagtggcgacacgaagaaaacgtcgtgtgcttttgtatgagccgcgcgtcgcgttttatacccagaacgcagaaaaaaagcaaagcataaatgcgcataatgtcagcattatcagaaacgtttaccgcctgattttgaccgacattgcgacggccttcaaaaaaagctggaaattgggcgaagaagtgacctaaaatagccgtccagatgttaatccatccatactgattaacactcagactgccagtgtcagcaaccttcagactcatggtagaatcttctgtcatgactattccgcacaacagtttgagctaactaaattctccttaggtgaaattaaatatggcaaaacacctttttacgtctgagtccgtatcagaagggcatcctgacaaaatcgcagaccaaatctctgatgccgtgttggacgctatcctgcaacaggatccgaaagcacgcgtcgcctgtgaaacctacgttaaaaccggcatggttttagttggcggtgagatcaccaccagcgcctgggtcgatatcgaagagattacccgtaatacggtgcgcgaaattggctatgtgcattccgacatgggctttgacgccaactcttgcgcggtactgagcgcaattggcaaacagtctccggatatcaaccagggcgttgaccgcgcagacccgctggaacaaggcgcgggcgaccagggcctgatgtttggctacgcgacaaatgaaaccgacgtactgatgcctgcgccaatcacctacgcgcaccgtctggtacagcgtcaggctgaagtgcgtaaaaatggcaccctgccatggttgcgtccggatgcaaaaagccaggtcactttccagtatgacgacggcaaaatcgtcggtatcgacgccgtggttctctctacgcagcacgcagaagatatcgaccaaaaatcgctgcaagaagcggtgatggaagagatcatcaaacccattctgccgtctgaatggttaaatacgtccactaagttttttatcaacccaaccgggcgttttgttatcggcggcccgatgggcgattgcggtctgaccggtcgtaagatcatcgttgatacctacggcggtatggcgcgtcacggcggcggcgccttctccggtaaagatccgtctaaagttgaccgttctgcagcttacgctgcgcgttatgtcgcgaaaaacatcgtggcggcaggtctggcggatcgctgtgaaatccaggtctcctacgctatcggcgtagcggagccgacgtccatcatggtggaaacgttcggtactgaaaaagtgcctgctgaacagttgattctgctggtgcgcgaattcttcgacctgcgcccgtacggcttgattcagatgctggatctgctgcacccgatctacaaagaaactgcggcttacggccacttcggtcgcgaaaacttcccatgggaaaaaaccgacaaagcgcaactgctgcgcgatgctgccggtctgaaataatcgcccgcgcctgacgctgtttttcagtcagggaaaccataccgtacttatcaaggccagcgctctgctggcctttatcattgctgatacacgcaacgttatcagatattccagcgtgaatttatactgacctttttgtgatgcgcagcacaatccactctcccctttcgtttcttcgactacactttttatcattcagtttcagtcatcatgaaagcggttacattcattttcattaagaactgactacatcactatcggtatgctaattctgcgatgaaaatattacataatttttcaactttgtctaaataccaggcgattgatatggttataagattattaaaactattatttttcagataattaaataatcaccgagataaatagcagtgtaaacgattacaccattgtgattagcctcacatctttttacggcgtactcacctactcttaacatcgataaaattgctaacccaaccggagggcataatgcctgacaataaaaaacaagggcgttccaacaaggccatgacattttttgtctgctttcttgcagccctggcaggattactttttggcctggatatcggcgttatcgccggtgctttacccttcattaccgacgagtttcagattaccgcacacactcaggaatgggtggtcagctccatgatgtttggcgcggccgtcggcgctgtcggcagcggctggctctcctttaagctgggtcgtaaaaaaagcctgatgatcggcgctatcctgttcgtcgccggttcgctgttctccgctgcggcgcctaacgttgaagtcctgattatttctcgcgtgctgctgggtctggccgtcggcgtcgcttcctacactgcaccgttgtacctgtccgagatcgcgccggaaaaaattcgcggcagtatgatctcaatgtaccaactcatgatcaccatcgggattctgggcgcttatctgtccgataccgcgttcagctacagcggcgcatggcgctggatgctcggcgtgatcatcatcccggctattctgctgctgatcggcgtcttcttcctgccggacagcccgcgctggtttgcggcgaaacgccgtttccatgatgctgaacgcgtcctgttgcgcctgcgtgacaccagtgcggaagcaaaacgtgagctcgatgaaattcgcgaaagtttgcaggttaaacagagcggttgggcgctgttcaaagagaacagcaacttccgccgcgccgtgtttcttggcattttgttgcaggtcatgcagcaatttaccgggatgaacgtcatcatgtattacgcgccgaaaatcttcgaactggcggggtacacgaataccacggagcagatgtggggcaccgttattgttggtctgactaacgtgctggcaaccttcatcgctatcggcctggttgaccgctggggccgcaagccgaccctgacgctgggcttcctggtcatggcgattggtatggggattctgggtacgatgatgcacatcggcatccattcgccgtctgcgcaatacttcgctatcgctatgctgctgatgttcatcattggatttgcgatgagcgctggtccgctgatttgggtactgtgctccgaaatccagccgctgaaaggccgcgatttcggcatcacctgctccaccgcgaccaactggatcgccaatatgatcgtcggcgcaacgttcctgaccatgctgaacaatctgggtaacgccaacaccttctgggtctatgcgggcctgaacgtactgtttatcctgctgaccctgtggctggtgccggaaaccaaacacgtttcgctggaacacattgaacgtaacctgatgaaaggtcgtaaactgcgcgaaatcggcgcccacgactaatccctccacgcttcctcctgccacaggaggaagcgtttttcttgcagtccctcttccgtcgcactattctctgccgctatgaaaacccctcgtctccctatcgctatccagcaggccgtgatgcgtcgtctgcgggaaaatctcgcccaggcgaacctcaagctcgatagacattatccggagccgaaactggtgtatacgcaacgcggcacctcggcgggcaccgcctggctggagagctacgaaatccgcctcaacccggtgttactgctggaaaacatcgacacctttatagcagaggtcgtgccgcatgaactggcgcatctgttggtgtggaagcacttcggacgcaaggctccgcatggcaaggaatggaagtggatgatggaaagcgtgctgggcgttccggccagacgtactcatcaatttgcgctgcaatccgtacggcgcaacacctttccctaccattgccaatgccagcaacatcaactcaccgtccgccgtcataaccgcgtagtacgcggcgaagcggtttatcgttgcgttcactgcggtgaaccactggtcgccgggtagttcccgaaacgtccgggaactttcctgagcggactgattgcatacagacacaactttcgttacgttgcgggctcgttttgctatggagtgtgcaatgtaccgtaatttttcttttgccgctgcgttgctggccgcagcgttttcaggccaggccctggccgatggcattaacaatttttctcaggccaaagcggcgagcgtcaaagtcaatgctgacgcgcccggcagcttttactgcgggtgccaaatccgctggcagggtaaaaaaggcgtcgtagacctggagtcctgtggctataaggtgcgtaaaaacgagaatcgcgccagacgcattgagtgggagcacgttgtccccgcctggcaattcggtcatcagcgccagtgctggcaggacggcgggcgaaaaaactgcgctaaagacccggtctaccgcaaaatggaaagcgatatgcataacctgcaacccgcgattggcgaagtgaatggcgatcgcggcaactttatgtatagccagtggaacggcggcgaaggtcagtacgggcaatgcgccatgaaagtggattttaaagcgaaaatcgccgagccgcccgcccgcgcccgtggcgcaatcgcccgcatttatttttatatgcgcgaccaataccaactgaaactttcccgccaacaaacgcagctttttaacgtctgggataagcagtaccccgttaccgcctgggagtgcgagcgcgatgcgcgtatcgcgaaggtccagggtaatcataatccctatgtgcaacgcgcttgccaggcgcgaaagagctaacctacactagcgggattcttgttaacccatgccctggatagccaaacgccggggccatgacgcggatttttttattatgcgtattccccgcatttatcaccctgaattgttgacgtccggtacgcagatttcgttatgcgaagatgcggccaaccatattggtcgtgtacttcgcatgggaccgggacaagcgctacagctgtttgacggcagcaatcaggtattcgatgctgaaatcattagcgccagtaagaaaagcgttgaagtgcaagtgatgaaaggcgaaatcgacgatcgtgaatcgccgctgcatatccatctgggccaggtgatgtcgcgcggtgaaaaaatggaatttactatccagaaatcgatcgaactgggtgtaagcctcattacgccactgttctctgagcgctgcggcgttaaactggatagtgaacgtctgaacaaaaagcgccagcagtggcagaagatcgccatcgccgcctgcgaacaatgcgggcgtaaccgggtgccggaaattcgcccgccgatggcgctggaagcctggtgcgccgagcaagattccgggctgaagctcaatcttcatccgcgcgcccatgccagcatcaacactctgccgctgccggttgaacgcgtccgactgctgatcggcccggaaggcgggctgtcggcggacgaaatcgcgatgaccgcgcgctatcagtttactgatattctgttaggacctcgcgttctgcgtactgagacaaccgcgctcaccgccattaccgcgctacaggtgcgttttggcgacttaggatgaagcgttaacggagaaaataatgatcaagctcggcatcgtgatggaccccatcgcacacatcaacatcaagaaagacaccagtttcgctatgctgctggaagcccaacgtcgtggttatgaacttcattatatggagatggccgacctttatctgattaacggcgaagcccgcgcccgcacgcgaacgttgagcgtggagcaaaattacgataaatggtacgagttcggcagcgagcaggagattaaactcgccgatctggacgtcattttgatgcgcaaagatccgccgtttgataccgagtttatttatgcgacctatattctggaacgcgctgaagaagaagggacgctgatcgtcaacaaaccgcaaagcctgcgcgactgtaatgaaaaactgtatactgcctggtttgccgacctgaccccggaaacgctggtaacgcgcaataaagcgcagctcaaagcattttgggaaaagcacggcgatatcattatgaaaccgctggacggtatgggcggcgcgtccattttccgcgttaaggaaggcgatcctaacataggcgttattgccgaaacgctgaccgagctgggcaaccgctactgcatggcgcagaactatctgcccgctatcaaagatggcgataagcgcgtcctggtcgtcgacggcgagccagtgccttactgcctggcgcgtattccgcagggcggcgaaacccgcggcaacctggcggctggtggtcgcggcgaaccccgtccgttgagcgaaagcgactgggaaatcgcccgccgcgttgggccgacgcttaaagccaaagggcttattttcgtcggtctggatattatcggcgaccgcttaacggaaattaacgtgaccagcccaacctgcgtgcgtgaaattgaagcggaatacccgatctctatcaccgggatgttgatggacgccatcgaagcgcgtctggcgaagtaaaggtttattgcccggtggcgtgcgcttaccgggcctgagcaattacgccgccccggtcggataaggcggcgcatcagcatcgccatccggcaatctattgcccgataaggcagccgtcctttggcaaaagacggcttatatgagtgacaaccgtccgctttccccacatactgaacgctgtcgtttttttgaaccaggaaacagaacctctgacaatgaatttacagcatcactttcttattgccatgcctgcgctccaggacccgattttccgccgttccgtggtgtatatttgcgagcacaaccaggacggcgctatggggattattgttaataagcctttggaaaatctgcaaattgaagggattctggaaaaactaaaaattacgccggaaccgcgcgattcggcaattcgtcttgataaagccgtgatgctcggcggcccgctggcggaagatcgcggatttattctccatactccgccgtcacgtttcgcctccagcattcgtatctcagacaataccgtgattaccacctcccgcgatgtgctggaaacgttaggtacccaacaacagccttccgatgtgctggtcgcgctgggctacgcctcctgggataaaggccagcttgaacaagagttgcttgataacgcctggcttaccgcgcccgccgatctcaatattttgttcaaaacgcccattgccgagcgctggcgcgaagcggcaaaacttattggcattgatattctgaccatgcctggcgttgcggggcacgcctgatgagcggcaccttactggcctttgacttcggcacaaaaagcatcggcgttgcaataggacaacgcattaccggcaccgcccgtccgcttccggcaatcaaagcacaggacggcacgcccgactggacgctcattgaacgtttgctgaaagagtggcagccggacgaaattattgtcgggctaccgctcaatatggatggcactgaacagccgctgacggcgcgcgcacgtaaattcgccaaccgtattcatgggcgtttcggggtaactgtcacgctgcacgatgaacgactcagcaccgttgaagcacgctccggtctgtttgaacgaggtgggtatcgcgcgctgaacaaaggcaaagtggactcggcctccgccgtgattatcctcgaaagctattttgaacaggggtattaaagccgtttttgtcagcaggcgggtaacgcggtcacggttgccaggcttactgggcaataagctggtttagtgccttcagcgcctgtaaacgcgcagccgcctccgcctcatcaatccgccacattcccgcaaaggccagcgctgcggcgtgcttgcctagcggttgcgccatagaaacttcaccatcagcgtgatgccacagtacgtatccccgctggcgctgctgcgccacatgcggcgccagattacgccattgctccggagtaaaacgctgcattagcgcctcatcgctttctgccgccagtaacgccaccccaggtaccgactgccaggcagggtacatgcgaaaccccgccagcgcctgacttccctgcgaacccggcgtagagtgataaatatagataatctggtcttcccatagcacgcctaatgccaccacgatgtctttgggcgcatggcgctcaaggataggcaacgcatgggagaacagcgctgaaccgcgaatcgcctgcgccgccaaagcatgaatgcctggcccgggtaaatagcgtcggtgctcatcctgcatcgtgagtccaatagaggccatcgtcattaacaggcgattaacgcgcgtggtattaatatccatcagccgggcaagctcgcgacatccgatagcacggtcgctggagaccagatattgcagacagcgaatgccatctatcaggctttgattcggttgtgatgacatcgttaaatggcttcgctgtggttttaacaaagctgcgattttaacgccggttcgccaggatacaagcctgcatgccgttcaatccaccgcgccagtcaacactttacaacccccctacgccgccatcttcgctacagtcgtccctgcgcctgacgccattgcgcgctctgggcgaatgtcatcatcccctgctgctgcccggtttgtatcacgtgggccaactgatggagtttgccttcacggatcaaattccctgtggctggcgtattaatcagtaattcaaacaacgccacgcgcccatcctgtctgtcgacctccagtttttgtgatagtacggcgcgcagactacccgccagttggctgcgtaccggttctttttcctgcgccggaaaactatccactaatctttccaccgcctgcgccgcaccgcgagtatgcagggttgccagtaccagatgccccgtttccgccgccgtcagcgccaggcgaatggtctcgctgtcacgcagctctcccagcaaaatgacatcaggatcttcacgtaacgctgcgcgcagcccggcggcaaaagtggcgcaatgctggccgatttcccgctgctgtatcaggcaacgcttgctggtgtaacggtactcaataggatcttccagcgtcaggatgtgtttatcggcatgttgattaagatatcccaccatcgccgccagcgtggtggacttcccgcagccagtagcgccagtgaccagaatcagtccgttctcgctggcaagcagtgcgggtactatcggcggcgtctggattttcgccagatcaggacagcgctcgggcaatagccgtagcgccagcgacgttccctgttgatgtgtgaacgcactggcgcgcaggcgccgcgtgccagacagcgagacggcgaaatcaagctggccgtgcgttcgccactgatattgttgcgcatcattaagccaatcaagcagaagcctgtcgacatcaggcgcggtaaaaggcgcgttctccatgcgtccttgtttgcgccatcgcgcaggccaggcgttacacaggtgtagatccgagacgttatgctttacactaagcgtcacaatttcttccatattcatataaacatcctcggaaaatgaacgatatcgcgcataacctggcatacatccgggacaaaatctccgccgcggcgacgcgttgcggccgctcttcagaagaagttacgttgcttgcagtgagtaaaaccaaacctgcgagcgacatcgcagaagccattgccgccggacaacgggcatttggtgaaaattatgtacaagagggggtggaaaaaatccgccactttcaggaagcgaaagtggaaggcctgcactggcactttattggccctttacagtccaacaaaagtcggctggtggccgagcattttgactggtgtcataccatcgatcgcttgcgtatcgcctcgcggctgagcgaacagcgtccggataatctgccggcgctaaatgttctgatccaaattaatatcagcgatgaaaacagcaaatcaggcattccgctggcggaactggatgagctggccgctgcggtggctacactgccgcgtctgcggcttcgcggactgatggcgatcccggctccagagtcagattatgtaaggcagtttgaagtcgcacgtcaaatggctgtagcatttgccgggctgaaagcgcgctaccctgacgttgataccttatctctgggtatgagcgacgatatggaagccgcgattgcggcaggtagcacaatggtgcgcatcggcaccgctatctttggtgctcgtgattacacaaaaaattaaggaaaactgaggaacgccatgaatacgttgaccttcctgctctcaacggtaattgagctgtataccatggtgctattattgcgcgtgtggatgcagtgggcccgctgtgacttttacaaccctttttcccagttcgtggtgaaaattacgcagcccatcatcggaccgctgcgtcgtattatcccgccaatggggccgattgacagcgcttccctgctggtggcgtttattcttagcgttattaaggcgatagtgctgtttaaggtaattacgtttcaggcgattatctggattgccgcggtgcttatcttgcttaaaacaatcggcctgctgatcttctgggtgctgctggtcatggctatcatgagctgggtgagccagggtcgtagcccgattgaatatgtattgattcagcttgccgagccgctgctcagcccgattcgccgtatactgcctgcgatgggcggcatcgacttctcgccgatggttctggtgctgctgctgtatgtcgttaatatggggatcgctgaagtcttacaagcgacaggcaacatgttgctgccggggctgtggatggcgttatgagtgctgtgactcgctgcgaagacggtctggtgttacggctttatattcagccgaaagccagccgcgatagtattgtgggtttacatggcgacgaggtgaaaatcgccattaccgccccaccggttgacggtcaggcaaacagccatctgaccaagtttctcggtaaacagtttcgcgtggcgaaaagtcagatcgtcatcgaaaaaggcgagctgggccgtcacaaacaggtaaaaattattcacccgcaacagatcccgccggaaattgcggcgttaactgagtaggtactccatgcaaaaagttgttctcgcaaccggcaacgccggtaaagtgcgcgagctcgcgtcgctgttaagcgattttgggcttgatgtggtagcgcaaacggaactgggcgtcgattccgcggaagaaaccggcctgacgtttattgaaaacgcgattctcaaagcgcgccatgccgccaaaatgaccggcctgcccgccattgccgatgactccggtctggccgttgacgttttaggcggcgcgccgggtatctattccgcgcgctattctggcgaaaacgcgacagatcagcaaaatctggaaaaactgctgcatactctacgggatgttccggacgacaaacgccaggcgcgattccattgtgtactggtttatttgcgtcatgcggaagatcccacaccgatagtctgtcacggtagctggcctggcgtcattactcgccaggcggccggaaatggcggatttggctatgatcccattttcttcgtaccgtctgaaggcaaaaccgccgcagaactgacccgtgaagaaaaaagcgcgatttcccaccgtggacaagcgctcaagctgctgctggatgcgttacgcaatggctaaactaccgccgctcagtctttatattcatattccctggtgtgtacaaaaatgtccatattgcgacttcaattcccatgcgttgaagggcgaggtgccacatgacgactacgtccagcatctgttaaacgatctggatgccgacgtcgcttgggcgcaagggcgtgaagtaaagaccatttttattggcggcggtacgccaagcctgctttccgggccggcgatgcaaacgctgctggacggcgtgcgtgcgcgcctgaatctggcggcggatgcggaaattactatggaagcgaaccccggcacggtcgaagccgaccgcttcatcgactatcagcgcgccggcgtaaaccggatctccattggcgtgcagagctttagtgagcctaagctgaaacgtcttggccgtattcacggtccacaagaggcgaagcgggcagcaagactggcaaatgggcttgggctacgcagctttaacctcgacttgatgcatggattgccggaccaaacgctggaagaggcgctgaacgatttgcgacaggcaattgcgcttaatccgccgcatctctcatggtatcaattgacgattgaacccaacactctgttcggttcgcgtccgccggttttaccggacgatgacgctctgtgggatatctttgagcagggccaccagttattaaccgccgcgggctatcagcaatacgaaacgtcggcctatgccaaacccggttatcagtgccagcataatctgaactactggcgctttggcgactatctggggattggctgcggcgcccacggtaaagtcaccttcccggacggcaggatcctgcgcaccaccaaaacccgtcacccacgcggttatatgcagggacgttacctggaaagccagcgtgacgtgagtgatgacgataaaccctttgaattctttatgaactgttttcggttgctggagcgcgcgcctcgcgccgaatttgtcgattataccgggcttacggaagcggttattcgtcagccaatcgacgaggctattgcccagggctacctgaccgaatgcgagcaatactggcagattacccggcacggtaaactgtttttaaactctcttcttgagttgtttctcgcggaataacaaggataagcctgtcgcgccagcgggtaaaatacctgatggcgcgacgcttaccgacctgtggcggttaatgcgccgccggcaaacgcattatttaataacccctttacgacgcaaatcgtccgtatcttttttccagcgctcgtaaccgtcattaatatccataattttcacacggatatcactctgttgcatctgaagtttctgtaccgctatattcagcggatattgccctttctctaacgttatccagtcattctgcgcttttcgacgcagctcttctgatttcaaaaatacctgccgccgttgctcgtgtatgtctaaatctcttttctgctgaatagccgcttcattgcacggctcactctgcttacggcacgcgtctaatgccggttgatagacctctttttcgtatttctcggcatatacgctgctatcgttggcttttacataatcatcgcgctcttttaacgtctttttaaacgcctcggcgcgggtcaacggtttcccatcagcgccttttccccaatacgcgtccgcttcttttttagctaccgctattttcttatccagggcagagagttgttcttcaagaccggggatcgacgctttctgcgcacgccaggaggcttcaatgttgccaaaccgatagttaaagtcatcactgttgacgatcaggtatttatcattcgttttaatgtcgtcaatagcccggccctgatcgctggctgccatttgtaatgagtaatagttcaccgtccagccagaggctggcgtccctttactggttaacatggcagaaaatttaacgggacgatctttggtccaggttttttcaacaaaataataatccgccgccataccaacgccggtatacatatcttcacgggaagaaatatccccttcggcagaccaggtggcctgattgcccgtcgaatcaagattttttaaggtaatggaatccagtttaagtatgccgtggtactgcttactaaactgttcttttaagatgttatcggagggttgagcaacctctgcccaactatagcctgaaatcagggcaaacagcgctgcgccagcaatccattgtcgaaccacttgtggacctcccgtccagagacatgacacccacgattatcataaccaggatgataattagcaagataatagtgttggttgtgcgagaggtcttccaaagatagccccggccttccgaccggggcattatctttaatactgattgaacatcgtctggatctgttttggatctttagtctgggttaacgccagttgcagtaagacacgcgctttttgcgggttcagcgtgccggaagcgacaaagccgtattttgcatcgtcaacttccgcatcctgcgtggttgcgccagtcggcactcgtgaagaacgcaccactaccgtaccgttgtgcgcggcggtcgccagggtatcaaagaccgttttatacaggttgccgttacccactcctgcgctcacgatcccgtcataacccgcgtctaccagcgcttttgccggcagatcggacgcattcgcatagttataaacgataccgactttcggcaacgcggtcagcttcgacacgtcgaacggggtggaggtggtatgtttacgctctggcgtacgctggtagtcaattttaccgttgtggatataacccagcgggccgtagttaaccgctttaaacgtcgccacgtcagtcgtattggtcttagtgacgtcgcgtccgtccatgacggtatcattcattaccaccagcacgccgcggttggcagactgtttatcagccgctgttactaccgcattatagaggttgaacgggccatctgcgctcattgacgtggaaggacgcatcgcgccgaccagtaccaccggtttattgcatttcacggtcagatcgaggaaataagcggtctcttccatcgtatcagtaccgtgggtgatcacgaaaccgtcggtgctgtcgcactcggtattgatttttttcgccagcgtgagccagacttcatcgttcatatcctgcgagccaatgttaacgacctgctcgcctttcactaccgcaatgtccttcaattgaggaacggcatccaccagattttcgacgccgactttacctgccgtataatttgattttgttgctgaatcaccaccgccagcgatcgttccgccggtcgctaagatggtgatattcggtaaagcgaacgctgcgccgctgaaacccattaccagagcagctaatgccgttttcctgaaaaactccatgttatatctccagttatgtcaactggtcgcattatctctatattgcagacgaataatgtgacgccatacgattaaccagcgatatatatccgacagagagtattttttagagatggataacaaaatgcaggaaaaaacagaataaaaaggcgcagatacgatctgcgccattgtttaaaaaggaaagattacttcaggctgccaaccagcgctttgcggctatcttctaaggtcactacgcggctacagacatctttgccaaactgctggaaatctttctcctggtttttccattcgttctggatagcggtttgcaaaccacctagactgcccatcacgccctgtaaaggattgccgccgcctttaagcaccgctttggcgcccatttcgttaatgctgtcctgcaaaataccgcccatcgcctgattcaccaactgctgaccgtcggcacgcacctggtcgatagccttatagtggaacgtcaggccgtccgtacgatgttcgataatgcggttcatttgcgcttttaattgcgcatcaagcttcgtcagacggctacgcatgttgctgctttcgcccacctctttagcgatgattttatccagcgccacgcggcctttttcgacgcgcgatcgggcgccctcatcaatccacggcagcgcgcttcgcagttccgcctggtaatctttcgcctgctcgcgctgcgcggcgctaagggtgtactgcttaccgttgtacatcacattgccgtccggcgtgatcaccaggttgccgttttcacctttcacctgcaccgtttgtggactcaggatcacatcgtcacgcggcgtgacgctgcatttgtaatctgcatgagcggccatcgccgtaaacgttagcactgtcgccagcagcgttttgcgcatcataactttccctcaagacaaagcgggccggcatttgccgaccctgtacttattagtcccaccaaacgtcgaaaagttcgctggttcggacttcttcaaggttgcgcgcttccagccacttacgcacaatcgcctgatgttcttcggtacatttaccgatttcctgcatacaaatcagcccttcccaggccaggtagccgctgccgtcaaacgccagtttattaggctcaataacgtcattaataaagtcatcgacagtcttatcgacctgctcttcagatgtaccttccggaaaacgccatgccaccgaaaatcctaattcctggaattcgtcaatgtgcatttttttacgcagacgacgactacggttctttgccattatttcaccctctcgaacattaagtcccatacgccatgaccaagacgatggccacgttgttcaaatttcgttaccgggcgcgattccgggcgcggtacataatcattgctctctgacagatttttgtacccgtcgatagaagacatgacttcaagcatgtgttccgcatacgcttcccagtcggtcgccatatggaaaacgccgcccaatttcagcttgctcaataccagttcagcaaacggcacctgaacgatacggcgtttattatgacgcgctttatgccacgggtcagggaaaaagagctgaaccatcgataaagaattgtcaggaatcattttatgcaacacttctaccgcgtcatggcacatgacgcgcaggttttcaacgccctcttcattagcggacgccagacacgcgccgacaccgggtgaatgcacttcaatgccgaggaaattctgctccgggcgcgctttcgccatcgccacgagagacgcccccatgccaaaaccaatctccagcgtcaccggcgcttcgcgaccaaacaacgtggcgaaatctaccggcgcttcgctgaactcgacgcccatcaccggccagtagttttccagcgcgtgctcttgcccctttgtcagtcgcccctggcgacgaacaaaactacgaatacggcgcagcgggcgaccgttttcatcaaattccggtgaaatgacgtcgtttttcataaaagtgtagtctgctgtgtttgagttctgaaaacgggcattatccaaagttagttgccggatgcaagcatgaagcgcactgcggaaagttccggtttacaccctgcggcctctgtgctgcaatcttgcccccggcaataatgaatgagtttccatgcaagcgtctcaattttcagcccaggttctggactggtacgacaaatacgggcggaaaacgctgccctggcaaattaacaagacgccttacaaagtatggctctcggaagtcatgttgcaacaaacgcaggtgacgacggtgattccttactttgagcgatttatggcgcgctttccgacagtgacggatttagcgaatgcgccgctggatgaagtgctccatttatggaccgggctcggctattacgcccgcgcgcgtaatttgcataaagcggcgcaacaggtggcgacgcttcacggtggagaattcccgcaaacttttgccgaaatcgccgcgctacccggcgtcgggcgctcaaccgccggcgcgattctctccctcgcgttaggtaaacattatccgattcttgatggaaacgttaaacgtgtgctggctcgctgttatgctgttagcggctggcctggaaaaaaagaggtggagaatacgctgtggacgttgagcgagcaagtgacgcccgcacgcggcgtggagcgttttaatcaggcgatgatggatctgggcgcgatggtttgtacgcgttcaaagccaaagtgcaccctgtgtccgctgcaaaacggttgtatcgccgctgcgcatgaaagctggtcacgctatccgggcaagaaaccgaaacagacgttgccggagcggacgggttactttttattgttacagcataatcaggagattttcctggcgcagcgtcctcccagcggtttatggggcggactctactgctttccgcagttcgccagagaagatgaattacgtgaatggctggcgcaacggcatgttaacgctgataatttgacccagcttaatgcgtttcgccacacatttagccatttccatctggatattgtgcctatgtggcttcccgtgtcgtcactggacgcctgcatggatgaaggcagcgcgctctggtataacttagcgcaaccgccgtcagtcggactggcggcccccgtggagcgcttgttacagcagttacgtaccggagcgccagtttaacgccccggtcgatgaagaggatgacttatgagcagaacgattttttgtacttacctgcaacgcgacgctgaagggcaagattttcagctctaccctggcgaactgggaaaacgtatctataacgagatctctaaggacgcgtgggcgcagtggcagcataagcagaccatgttgattaacgagaaaaagctcaacatgatgaacgccgagcaccgtaagctgctggaacaggagatggtgagcttcctgttcgaaggcaaagacgttcatatcgaaggttatacgccggaagataaaaaataggcccgttgctgaatgacgctgcgcttattcggcctgtgagttatgccggataagcccttagcgtcgctgcccggcaacatggcataacgacaacacaacatgcactcccggaatgatgaaaaaattactcgcgcttgctgttattgcgccgttgctcatctcctgctccagttcgaccaaaaaaggcgagacgtataatgaagcctgggtcaaggataccaacggctttgatattttgatggggcaatttgccaacaatattgaaaatctgtggggatataaggaagtcctgattgccgggccgaaagactacgtcaaatataccgatcagttccagacccgtagccacatcaactttgatgatgggaccattaccgttgaaaccatcgccgggacggaacctaccgcacatctgcgccgggctattattaaaacgttgctcatgggtgacgacccaacctccgtcgatctttactccgatgtcgatgacataaaaatttctaaagaacccttcctgtatggtcaggtcctcgacaataccggccagcctattcgctgggaaggccgcgccacgacattcgcggattacttgctgaaaacgcggctcaaaagccgcagtaacggcctgcgtattatttacagcgtcaccattaatctggtgccgaaccaccttgataaacgcgcgcataaatacattggcatggtacgccaggcctcccgtaaatacggcgttgacgagtcgctgattctggcgattatgcaaacggagtcctcgtttaacccgtatgcggtcagccacgcggatgcgctgggcctgatgcaggtagtgcaacacagcgccgggaaagatgttttccgttctcagggtaagtccggcacgccaagccgtaacttcctgttcgaccccgccagcaatatcgataccggcacagcgtatctggcaatgttgaataatgtctatctgagcggtattgagaatccgacgtcgcggcgctatgcggtcattaccgcctacaatggcggcgcaggcagcgtattacgcgtattctcgaacgataagattcaggccgcgaatatgattaaccgcatgtcgccgggggatgtgtaccagatattaaccacccgacatccatctgcggagtcgcgccgctatctgtataaggtgaattccgcccagcgatcgtatcgccgccgataaaccatcgcatcccgcctctggttggcaaatgacagaggcgggaaaggtaaaagtgttaactccgtcacccttttgctttgcaatcagaaattgtttgcaaatatttgtcacaggtaacaaaaaaagcccgcctctcattgatagaatcacaccaaatcacaacggcaaatgtgccttttaaaacattcatccgctctcaggtgtgaggaaattaacatgaatcttaagctgcagcttaaaatactctcttttctgcagttctgtctgtggggaagctggctcactaccctgggctcgtatatgttcgtcaccttaaaatttgacggcgcatctattggcgcagtttatagttcactggggattgccgccgtctttatgccgaccttgctaggcattgtggctgaccaatggcttcggctgtatcctgggcggcattgtgagcggtaaagtggtggagtattacactcaaaacggcattaccgactggcagaccgtgtggctcatcttcgcaggctactcgctggtgctggccttcgcgttcgtagccttgttcaaatacaaacacgttcgcgttccggcaagttcgcaacccgttgcacattaatccttgccctgtttcgcaggccggataaggtgtaaatgccttatccggcctgcaggcaacgttactttaaaacatatccgtacaagcgttgaattccatcggcatcggtctcgctatataccccctgcaattccggcgaaaaaccaggcaacagattgatgccctcttccagcgccaaaaaataacgctgcgccgcgccgccccaaatctcccccggcaccacgcacagtacgcccggcgggtatggcaatgccccctcggcagcaatacgcccgcccgcctcgctgatacgcaccagctctacatcgccgcgaataaaggcgctgttggcatcctgtgggttcatcgccacatgcggcaggctttctttgcggaacatcgctttttgcagatccttaacgtcaaagctaacgtacaggttgtgcatctcctgacatagctcacgcagggtgtaatcgcggtagcgcaccgggtatttctgaaaaaccgtcggcaatacatccgcaagcggcgtatcgtcttcaatgtgccgttcaaattgcgccagcatcgcgaccagtcgcgccagcttctcttcgctctcggcgggtgtcagcaagaacagaatcgagttgagatcgcacttctcaggcacaataccgttctcacgcagatagtgggcgagaatggtcgccgggatgccgaattcggtgtatcgcccactatcggcatcaatacctggcgtggtcagtaacagtttacaggggtcgacaaaatactggtcatccgcatagccctcaaagccatgccatttcgccccgggttcaaaactgaagaaacgacgattgctggcaatggtctccgtcggatatgcctgccacggcttgccgtcaaccaccagtgggataaagggctgaagcagtttgcaacgggcgagaatggctttacgcgcgtcaatgcccagcgcaacgcactccgcccacaggcggcgaccgctctccccttcgtggattttggcattgacatccagcgccgcaaacagcgggtagaacggactggttgaagcatgcaacatgaaggcgttgttcaggcgtttgtgcgggcaaaaacgcgcctggccgcgaatatggttatcttttttgtggatctgcgaggtttgtgagaaccccgcctgttgcttatgtaccgattgggtcacaaagatcccagggtcgttttcattaagctccagccgcaacggcgaggtatccgccatcatattgataaactgctcatagcctacccacgcggagtcaaacagaatgtaatcgcagagatgcccgattttatccaccacctgacgggcgttgtaaatagtgccgtcataggtacccagctgaatgatcgccaggcggaacggacgcgacgcatcggcgctttccggcatcacgtcacgaatctggtcgcgcaggtacgtttcatcaaaacagtgcgcatcaatgccaccgataaaaccaaacgggttacgcgccgcttcaagatagactggcgtcgccccggcctgaatcagggcgccgtggtggttggatttgtgattattacgatcaaacagcaccagatcgccgcgcgtcagcagggcgttggtgaccactttattcgccgccgaagtcccattcagcacaaagtaggttttatccgcattaaacacttttgccgcaaatttctgcgcgtgtttggcagaaccttcatgtattagcagatcgccaagtttcacatcggcgttacacatatccgcacgaaacaggttttcaccaaaaaagtcataaaaatggcggcctgcgggatgttttctaaaaaattcgccatgctggtgccccgggcaagcaaaagtactattccccatgtcgacatactgggtcagggtgccataaaagggcggcagaagttccgcttcgtagcgacaggcagcgttttccagctccagccattcctgcgcgttcccgactattaccgccgtaacgccgacaggcgcgctgacgggttcatccgcaagcataaacaccggcaggtgaaaaccggtgcgtttaagcaacgccagaataccgctacggctgtcggcagtggtaatgacgactgcggccacatcggtaaagtcggtactgtccagcgccactacgtttcggtgggtggagagacggggaatgagttcaccgctggcggcaatattcattgatttcataagcgcaaatatccgtttcgggagtagagtaaccccagacaaggcccgatgccttgcccaacgagatgccgggtcaaactggataccagctccgaccgccagacatcagtaaaaacagactgtttctgattttactgttgtcctgcagtgagcgtgcgctgccctcaccgcatagcggggatgacaaaaaaaggaaagaaaggggcaaacctcgcgcagtcaggcgacagtgaagacaatataaaggcgctatgttcatcccggcgagccccatgctggcaggagaaatttcgcgcaatcatggcacctttcaccaggcggcgcaaggtaaaatcagcgctctatacgtcacagataatcaagctattaacagcttaatcgcgtgataataaggcaatttgaaagacaaataacaggagtcattgtggtaattggaccttttattaacgctggcgcaattttattcggcggcgttattggcgcgctgttaagtcagcgtctgccagaacggattcgcgtctcaatgacgtctatttttggtctgtgctctctgggaattggcattctgctggtgatgaagtgcgctaatcttccggtgatggtgctggcgacgctggtcggcgcgcttatcggcgagttttgtttgctggaaaaaggcattaatggcgcagtcgcgaaaatccaacaattatttatggcatcgggtaagaagccgacacacgactcatttattcaaagttacgtcgctatcattgtacttttttgcgccagcggcaccggtattttcggcgcgatgcatgaagggatgaccggcgatccaaacattttgatcgctaaatcttttctggattttttcactgccattattttcgcctgttcgcttggcatcgccgtttcggcgatttgcgcgccgatgttgattatccagttaacgcttgccgcctgcgccaccctcattcttccactgaccacgccggcaatgatgggcgactttagcgccgtgggtggactgctgctggtggctaccggcttgcgtgtatgtggaatcaaaatgtttccggtagtgaatatgctcccggcgctgttgctggcgatgccgatctccgccgcatgggcgatgttttttgcctgattctgcgtgcaataacaacaaagtggtgatagattgtgcagtctacgttgatttgaagaaatttcgttgacgaagcgaggcgattacggtttaatgcgcctcgttgcccggatagctcagtcggtagagcaggggattgaaaatccccgtgtccttggttcgattccgagtccgggcaccactttcccttttttatgctttcttatgaattcctcgatgtcttcaagtcaataagtttgaacatagactctttccagaaattattgccatatgatctccattagaccaatataaacggatgcgtgatcataataaaggcagtaatagtaagttttaacattaaacatactgcgaaatttcaattaagtttccatcagggtccctgatgtagatagacattatctcgcctgtggctccagttctctcaaccgggccttcaacaatggaaatgcctgcctgtaagatctcagacacaacatcatttatcggtgtcgatgtaataaaacataaatcggcagatcccggcgttggtctactcgcttttggttcgaactccatttcttgctgatggaggttaattttttgcgctccaaatattaacgcttttctgttttgtttaaatgttaccgcagaaaaaccaagtacctcttcgtagaatcttattgtggttgatatatcagataccgttaatacaaggtgatcaattctgtcaattatcatttgaatagactcatgatgtttatattttagggatgctacattaaaaaatagcattaacctacttttaaatcagatgcattttttttgcatctactctaagttgctgccgaaaattgggatgtgccaattcaatgatgctgagcgcacgctcggttgaagagagccccttcaggtttacggagccaaattcagtgactatccagtgcgtatccgttcgtggggttgttacaggcccctcaaggcggggaacaatacgagaaatcgtatcattcgcggccgttgagcgggtcgtaataatggaacgacctcctttagatgcatatgcgcctctgacaaaatccaattgccctcctgaagcgctgtactggtgtccaagcaaatattcagagttacaggcaccagtgagatcgatttgtaaggtagcgttaatggagacaacattctcattttgcgcaatgatccccggatcgttaacataatcgacaggccgactaaaaaaagaggggttgtcgttgagatagtcatacatatccttttgtcccatagcaaaagtaaatacagacattccccggtcgatatttttacgctgattggtaacgacgccttgttgaatcaaacttaccaaccccggattcagcgcctctgtatggacccccagatcattatgttccttgagcgcattacagatgagctccggtaatgcgccgacccccatctggagacaagcgccatctggcacaagagaagcgataatctgactgatagcaatatcttcggctacggcagtacgtattggtagttcaattaaagggacatggttttcaacaatggcgtcaatttctgaaatatggattgcagcaccttctccatgaacgcgcggcatatatttgttaacttcgacaataagctttttagctgtcctcgcaatccgggtggaataatcgtttccagttccaaaattaaaatagccatacttatccataggggacacggtgtgaataaaggtatcaataccaatatcatcagctagtaatcgcgtcgcctgatgaaaatttgaaggtacatagttaactatttttcgcccggaactctcaatcccctgacgtattaaagcccgttcaataccggtaataaacatactgtagagatgaatatagtcacttagctcataacggaaaatagtgttcccggcaatgctggctgtttcataacagtaaacccgcagatcgttgatttctccccttttcgctcgctttgccagcgcattcagcaaagctggaggctctgctgcaaacattcccatagagaggtgactgccggaggtaattaaagtaaccgcctcgtcaggcgtcacgcatttttcggcatacactgcattaacattcatcatgactctaaacctcagggcgatttctcaataagcggcgtcttcttcaggcgaacatccacagcaataaactaacattgttcgttcgaagcgcatgacctctacaccattctggttaataccacatgtccgaacggtaacgatgccttgtcccgggcgactatttgacaggcgtttgctgagtacagtgctttcagcataaagtgtatcccctgcgaaaaccggatggacggcttgtaccttatcccagccaagattggccacgaccttggcgctgacagtacgcacgctcataccggttaaaagcgccagagtgaacgttgaatcaaccagtaactttttccattccgttttgctggcgtaagccgcatcgaaatggaccggctgcacattgagagtgagcagggtaaaccacacattatcggcgtccagaaccgtccggccgggacgatgttcaaaaacatcaccgggatgaaaatcctcccagtaaagacccgaaatttctcggtagcgcccctcgctaatggttttataagcgggtaataacgtgttcataatcaattcctctgttaataaaatcaggaaaagatccctgcccgggcgagtaatctccgggcctgacgggcaacggctgcatctatcatcatgccgctaacgatcccgacgcctttggcattctctgtcagtactgcacgagcatgattaatttctgccgttgtaggagtaaatgcggcgttgattacactaatctgagcggggtgaatagccgattttgcagaaaaaccaaaactgagcgcctgcagcgtttcctctttcagacctgaaaaatcgcctatatcaaagaagggagcatctattgcaagaagccctttcatagcgcaggcagccactattctggcccgcgccagcgcaagaggctcccaggcgggtgtggcgccaatgtcagccgccatatctgcggcgccaaacatcaacccgcagagtctgggggtggcgtccgcaatagactctacggcattaagcccaacaactgactcaataatgccaataaggcgagtatcagaaccagccatcatgataagactatccacgatttgcaggtgcgcggctgactctgtttttggaagaataatgtaatcaggaaaaaaacggcattccagtaacatatgcaggtcttcaatgccagcatgagtattcattccattaattcttaatgctattttcagcgatgagtttggtcgggatgaaaggaactgcatcgcaattttccgggcctgcgccttgtcattcggggtgacggagtcttcaagatcgataatagaaatgtccgccgcactttcaactgcttttatgaaacgttctggtcgaattgctggggtaaaaagccagctacgtgtcggtgtatgagaaatatcgggcatattgcacctcctgttaacctcactatgcgctcgctggtttcattcttccaatatatgatggtgccattcttaattgcttttggagatgaggatggaactgcgccatattcgctattttctcgccgtcgctgaagagcggcatttcacgcgggctgcgacaaaattaggcataggtcagccgccgctaagccaacagattaaggatctggaaagagagctgggagcgcagctattccggagagtgcctcatggcgcggaattaaccgaggctggaaaagcattttatgatgttgttaaagggatgcctgctaccgcgacaagagccgtgctggcggcgcagcgtgtcgccaggggggagtcgggcgtgttaagggtgggttttactgcctctgcggcatttaacagtgtggtgcccggcgcaatccgtactttcaagcgggcttatcctgacgttcgtttgcagcttgaggaaggaaatacaacccaactggctgatgaattgaatgaaggatcgctggatgttgcctttctgagacccggttttacaggcaatgaacggttccagctcaggttactgtctgaagagccaatggttattgtgctggcagaaacgcatcctgctgcggcgtgtaaacagattgcactctcgattctcaaagatgagttttttttactcttcccacgtgaaatcggcctgtcgctttatgacgcagtgatcaaggcctgcggtaaagcgggctttgaaccgaaaattggtcaactcgtgccgcaaatttcgtcagtcattaaccttgtgtcggcagagatgggcgtgtcgatggttccagattcaatgagacaggttaatgtcaagggagtagtataccgccccgttgcagaccagatgcccgtcgcaaaactggctctggcataccggcgcggcgatacatcgccaacgctgagaaacttcatcctgaaagtcactggctgaatgcggttatgtgagcgttgaataatcatttgaaacgtaaccaataattattggtccgattttgtgtctaaaggaatcgctaacggagcaggaactggctgcaatgtctgtggatcgacagccagataacgcccggttttactgtcgatacccacataatcgataagcttgcctttggcataaagcaccattgtctgttttgcaaatgcctcatatgcgctgctcagtattttcactttatccgcataatttgctgcgagattatgcgtttccagggggtcacgttgcaggttgaataattcccatggcgcattacccgcctgtgggaatactgtgacaagacgacgcaatttccattccccatctatccaggccgcctgattatggagttcaacaccatattgtgtgcgaggcgcgtgcagactttcaccggtcagatagcgtttaaaactcacgccgatcattggcagtgtcggtctttcagataatgatttactggcatcaatacctgcaaattcatagagcgtgggcgcaacatcatacgccgccatcgtggcgttatctatggcgccatgatggatgataccaggaccggaaatcataaaactggtattaattcccccctgaccgctggtcgttttgtgatagcgaccataaggcgcattgctgacatcagcccagtggggaccataagagataaatgaatttttacgaccaatattttcgtaacgattatcgaattgcttccaaaaatccggttcagattcatagtgaaagccctccgccggattcacaccattatcacttaagaagaccagaatcgtgtttttatcgcgcccggtcttttttaacgtctcaataacggtgccgatctgtgcatccatattggcgatcatagcagcgtaaacctgcatcaccttcgccgtatatttctgctgttccggggtcatcgcctgccattctttatcaagttccagtcctggcagaggtatgtcatcacgcaggaaacccagtttcttcaaacgagcaatacgctgacgatagacgtctgcatagccctgttcatactgacttttaaaacgactaatccattcatccggcgcctgcagaggatcatgtggcgcagtaaaggccaaccacgcgaagataggttgttcccgtggcgtctcgctgatccagcgattaatctggctggcataggcttcgctggagtaaaaactggagggcagtgaaatgcgctgattgtcacgggtataataggtatgaaatatctccacggttcccagcggcacggcatcatcaaagtgactggcgcctccccccatcaaggcgaaagaatgacgaaagccccgatcttttggcgtcgagcctggcgtaaaaccaagatgccatttacccgccatcagcgtattgtaaccagcatctttaaagcgttcagccatggtcgtcacccgatcagtcaggcgcaattcatagccttccttacctatggtattttcataccaccacataccgcctatacccgcttgctgactggtgttcccggttaatagcatcgcacgggcgggagcagacatgggagacgtgtaatattgactcatccgcacgccgttctcagccatcgcctgcaaattaggcgttgggatttccccaccgaagggagtgatatcagaatatcccatatcatcagcgataatcacgataatatcaggacgttcgttttgcgtactgtgcgccgtaccggagaagataatgctaagtgtggcaagtgttacttcttttttcacggcttattctccatttcagactacggatgttgtacaagagcggcgggcaaatgcggcaagaggaaccatcagcccgaaaatctacccataacgtcagcacgccaggctttcagtccattcagatcccggggccaggcgcgtagcggagccagaatctccgtgaaaaaagagtaatagccgctacaaagtcggttgtagccggcactgttgatatgtgcggggcagcctccctggcagactattttcacagaacaccgttgacactcccggcgctggcttttcttaataccaaagggaagccgggttgcggaatctacggctggcgctaacgtattattagcaagctgtcccaggtaatgctggctattaatcagatgatcgcaggcatagagtttgccgtccggctccatgaccagattcgttccgcagcgggcggaatggacacaggtggcgctgatatgcgtaaaatattgtgcccatgcctgttcaatgttgatcacaaaaacccgtcccatatcgccgcgtttgcgccattgacgccagatatcaatcatgaaacgtccccagttatccgcactcaattggtaacgttgctgtagggcgttgccttcgttcatcagtggctgaaattgcagataacgaacgccaaggctaacaacatgatcgtagatggctgccgcatggcgagccatgtcatcatgcacgacaatcagtacattaaaatcgactcgatagtgttgtaacaatgtgattccccgcaacaccgccggatagctggcctcgccgcgtttgcccggacgatgatgattttgcaagtcttcactgccctcaagactgatgccaatagtaaaattattgtcgcgaaacagacggcaccaggcatcgtttaacaacgtcgcattcgtttgcagactattactgatcgtcacgccgtcaggcgcatatcgttgttgaagcgctattacctttttataaaaaccgattccggctaaaagcggttcaccgccttgccagacaaaattaatttcacgcgcactggcaggttgcgccgcaatatagcgacaaataaaaatctccagcgttgattcattcattttttctacgggcgtttcgccctgtggataataacaatagcggcaggccagattacatgcagggcctatgggctttgccagaatatgaaagggtatctgcgcgcgatattccgtcattacggggatttgttgttgccgtaatgtgttgagattcaacattattctgtcctgtagttatcatttctgatgcggagacatgactcacatttcgcaatagcgttcgtctggcgctgcgggcagaatgccgagagcaggctgtatctattgatacgccggttttctgcatagcgcatgacgctattgaaacgttatttagcaaatcctgtctgagccagaaattaagtctctgttaacctgcgctattacagaaaatcatagaacagtcgtctcaaaagaatatcgtcctgaaggacgagaactcacggcattttcaggagatgagtcaaccgcgacagaaaaaaatcatattaataattttaaattattttttagaaaaccagacaggatttaaattaaaatcatttattttcaagatgttataaaaaataccgcaacatacgtcacattattaacatgtgaatgattgtgttaaccgaatgtaaattgtatgtttcaacataccactattttactgcgccccgacgcgctcatccggatggaaggagataacatgtcagccttatcaactactggccataatgacgggatcactctccattgcttacagagcattgcgcaactcattcctctgtcgtcggcggttttttatcgtgttaatgcttatttaaagccagaagcctatgttttacataacatttctaatagcacacaccaacaatatctggagcattttcaaccattagacccgctatcgccttcccggttcggccaacaggttgttaccgtagcgacgatgacgcccggtatctgtgcccgacatcgccattattatcatgaatttatgctacctaatcatgtgtgcgacatgattgagatctttattcgtcggggccatcgtattatcgcgggcatttcattaatgcgcgatatacctttttccagcgaagagcgtttgcgagcccaggcagtacaaccattactgggactggcgattcatgattctcttcaggaagacaacgatctggagtcaatattgaccgccaaagagcgtgaaattgtgggaatggtctgcgaaggggccagcaacaaattgattgcccgtcagttgaatatttctctctcaacagtgaaaacgcatttacgtaatatttttgctaaaacagaagtgataaatcgcacggaactggtttcccgaaccagaatgtcttcggtacaacatgcacagcatatgtgaaagcgtgctttttaacccgcgtcaattgcgggtcttttccccattgtcatatatgcctgaattaataccactctctgatctgatgcctcaataaaatgtcatattatctggcgtcggtatcctgttgcagccattgattcatggcctgattgatcatatttatcacactaagcagaagaacacgctggtgccgctcaagccgcagataacggcgcagcggcggcattttacaaactacttcgctagcagcccatagctcaatgctgcaataccattccttatgatgtaaaaccagcgtaaaccgacgataatccagttcactcagtgcctgttgtaaattggggaaacaattaagatagttaatcagcccggcggtacttttgctgccagtaaaaatgacgggataacgtttcagccatccgggctgatgaacgcgaattttgccctgcaaaggataattgattgtgcctttcaccctgaattcacaactgtgaatactggccatgaataaccgtttttgctgagcatggcagataacctgggtaaatgcattcagatgcagcacggcgctatgttcggtcaatttttcacaacgccagccgctcaaatcacgtaacaccatgttcattaatgtgctcttaaaccaggggacggaggacatctggcgtcatctcttcattgtttcgcttttcataattgcccatagcccgttccacgacctcttctaccggaagcgggaggaaaggattaacccgttgcacacataatgtccagaataaggcataggcggcagtcaatccaagcataataccgaatggtataagtacatcccgactgttcattcctggaggcgcgatattaataatggcgataataatacccacgctcgaaataatctgaggtaagggaaaccagggggcccggtaagcgcgtggtaaatcggggcgccgaatacgtaagataacgaccgataacgttaccagcagataagctactccccaggcgcagaccgcagcgaggatcagcggaacaatgtggtcgatatcaccgttcagataccaggcatgtaaacagggaatcgcaacaccgaatgcgatggcgatgaccggtgttttaaagcgggggtgcaaccaggtcagaaaccgcggcaaagcgccgtccagcgccatgccgtatataatacgcggtactgccgccattagcgtattaatcgtcgcacatcccgctaacaacaaccccacgcccagccagtattgcccgacatgtcccatgacacgattggcaaaggcgggaatagccatcggcgtatccagtaaaaagatatggtttgccgcatcgaccaccacattatttacctgccggttaatcgcagcgccatagaggaacatacaacctgccaccgctaaaaggccaagcgccatcgctctgggaatcgtacgatgcgcttttttaatttccggcgccattggcgtgaccagttcacaaccgacgaacataaacatcgccatgccaatataaccaaacagaccagaaagattactgacatcaagcggtgcgccaaaccacccggaatgatgagtgaccggggataacaggatcccgcataaaccgaagatggtcagggtagtccacataccgaatgtaagaaacacttccaccttgccaaatacttcaacaccaatggcattcagtaacccgaaaaccactaccatgccgacgccaaccatccaggtattgtgctgcatggccacgtgttctctaacagactcaaagttcaccagcgccatgacgccagcgagaatcgtttctgccgtgccggcaaaaatgtgtacgatcaggtaagcgcaaagcgcaccggtgatagcgaaaaaacgccccatcccgcaggaaatatagtcgtagacggagccagtcgtgggaataagcgttgccgcttcggcaaaggtggtaatctgcgcttgcatcataataaatgccagtaataccgcaagagcaaaggtatctccccctgagccaaaaccactggtcacggtcaggatcaccgggcttgccataatcagcccgacggagctggcaagcgtcgtggggaaaccaataacgccacgttcaagatggctggcaagtctgtttttaaacatggtcaacctcttcactattattacaacaataaattaccgctccggaataacgcttatttatggcaggcaccgtatctaacaggtatcgtcctgaagagggataacggtaaataacgttgtgacgccgtccccgcatgcgctaatagcaagtggggagcgcgttattctccccagtgatgccaacgctactgacgaacaattaaaggattcaaccctgcttatggctttcaacttttgccagataatgttttacaaaacggggcgttaaaactttccatgccacttcggttccctgttcaacaaaccaactatcgcctggtgaaaaacgtatcggttcctgacccgcaacagtgagttccacttccccttccagcacggttgcgtgctcggtaaagggataaatcatagtgaaaccgccgcgggtcgatgaaaacagtccacaggtaaatacgtcctcaggtttaccgtaaatcatcgcaacggcgacctggggatcgccttctgttggcaacgcccccaacaggctgacactcccgattggctgtaattcaggaacaggttgattgagtttaaaagcttgcattaatgttctcctggttaattccggcctttccagaaaccggctgtttgatgtatcagttttcccgcactgaccagcaatagacgtagactgtcgcgaccataaattgtcgcgtggggaatgctactcatcagacgataccgctcggaaccgccatttattccttcggccaggattttgcatacaatatgggaaggcgtgacgccaaatccggaataaccctgaacataaaaaacattattgtgctcacgaagcgtgccaatctgcggaaacagattcgcgctacaggccatcggtccgccccaggcaaaatcgattttaacgtctttcaaataaggaaagacctccgtcaacagagtgcggttccaggcagcaaaatcgtgcggggtatattcaagaaaccttgtggcgctgccaaacagcagacggttttcttttgtgagacggtagtaatttatcaccgggcggatatcactaaaagccccgcgcaagggactgatccgctcaacaagctcgctggagagaggttctgtagagacctgataagaataagtaaccagcgttttcttataaatttctggttccagattattgagaaaactatcacaggcccacagcaatttggccgcttttacgctgcccatcgcagtacgtacccgcacagttttaccgtaactgacctcaaccacaggtgaatattcgaatatcttcacccccagcgaattcgcagcctgagcggagcccagcaataaattcagcgagtggacatgccctccccccatatgcttgagaacaccgcagtagacgtcggaaccgataacctgctgcacgtctttaccggtatagagttcaatatcgtcttccggcgtagcggctttgaattctttttcccattgttgcagcgtttttaactgccgctggttgtaggccagataaccatatccggggacaaaatcagcatcaatatggtatttacgaattcgctcccgaataatgcctgcgccgaggttcgagattttaaacagcgtctccattcccgctgcgcctacatattttttaacggcttcgatgtcgtgacctataccggccatcacctgaccgccgtttcgcccggtgccgccatacccaagatggcgggcttccagaacgacaacattagtgatcccctgctccgccagttccagcgcggtattgatgcctgaaaagccaccgccaatgatcaccacatcggcatcaatatcgtcttgcagagcaggaaaatgcaacgggtattttttcgtcgcgccgtagtaattcaacgcatcgatttttgtattcatcgcgttaccttgtcatcacgcttgactaagaccgctatcacagcacggtaacgttttacaaaatatcgtccggaagaatgacgttctttggaacgatattcagttccaggcaagtatgttgagatggaaaaacgtacattcctgacctacaggcacttctgatgagcgacgtgacattacttgccgaagtaacgacttttttacgccaacgacacggacaatttattgcaggtgaacgtcaggccggaaacggcacgaacttctcggtcactaacccagccaccggcaaaatcatcgccgacgttgtgtcggcaacccctgcgcaggcagaagaggccatgcagagcgccagacgggcgtttgatgtctggcgtaaaatgccaacgttacaacgcggcgcattactgctgaaactggctgatactcttgccgctcatcgtgaagagttagctcaactggaaagcgtctgttcaggtaaaacgattatgctgtcgcgcggtcttgaactcgatcagtcagtggccttcctgcgttactttgccggttgggcaggaaaaataaccggtgaaacgctgaatgtctccctgccatcaatgggagaagagagatacacagcgtttacccaacgccaacccattggcgtggtcgtcggtattgtgccgtggaatttctcaattatgattgctatctggaaactggccgcagcgctggtatgtggctgcaccatcgtcattaaaccaagtgaatataccccgctgacactgctgcgagtcgctgagctggctaaagaggcaggtttccctgatggcgtaattaacgtggtaaacggtgctggcggtgagatagcgcaacagctgatcgcgcatccagattgcgccaaagtgagtttcaccgggtcagtcgcgacaggtgagaaagtccggcgttcggcaacatcgtcaggaaaacgcgttaccctcgaactaggagggaaaaatgcggcgctgtttctcaatgatctcacggcacaagccatggtcaacggtattcttgaagccggttatctgaatcaagggcaaatttgtgctgccgcagagcgtttttatctgccccaggaaaaactggatacggtcatgacgctcctcagacaacggttatcggagatcgtgcccggctcgcctttagatgaaaaaacggtgatgggcccgctggcgaatcaggttcagcttgaaaaagtgctgcgtctgattcaacgtgcacgggaagaaggggataccattgtttatggcggtgaaactttacccggcgaagggtactttttacagccgacagcggtaaaagtgcgtagtaaaaacagtacgctgatgcacgaggagacctttggccctgtctgtagctttatcggttatcagaatgaaaaagaggcgctttcgcatatcaacgattcgccattcggccttgctgcaagtgtgtggtcggaaaatatatctaaggcattacgctacgctgaagatattgatgctggcatggtgtgggtcaatatgcataccttcctcgatcccgcggtaccctttggagggatgaaaggatcgggcataggtcgtgaatttggcagcgcgtttattgatgactataccgaacttaaatctgtcatggtccgttattaaccatcctgaaaatgatgcaggcagatcaaccataccgaaaggtggactgtctgcctgattatcaggttcgctcgctgcgtttttttgcttttgggataatgttaaacgcccggcccggcgttccttcctgcattactagcgccatctaccgttagagtaggctatctccagccttaacggttcagactcatcctgtaacatcgcttccaaagacaacgccagcgtctgatgatgggcatcttttacactgactttcagcatattgatgctcggttcataacgtaaaatagcagcgcgaagctcacggcaaaaccagttgagaacccgtttgtcacccacattcacctcgtgccattccggcataccccgagtgagcagcggcggtaatgtctcgccacctggcacggcgcaagagttgaataaacacattaacttgcgtcgtaccaattcatgtgggcttatcccctcaaccaagagcctgtcgaatagcgcgaccggaatggttggtgtcatcatcatttccctatctggttcatcgccagatcccatactgacgttctggactcctgctgagcgccgtctgatttctcggcagtgatttgccattcgattttcgtgaagttcagcgacatcgtttccaccggcttaccgccggcgccgccgctaacactgagttgtgatatcagcacgtttgtcagggtataaacgataagcgaccgcattttgccgtcgtcattgcggcacaacgtcagcaccgcggttctaattagcctcccgctacagcagtactcattgagcacaggcgtggcgaggtcgacaaatttggtgagcgacatttcaccaacatgcgcgcgcccggaagtccgctcagtgaggctaacatcgttatttacctgcattgccacattgtggctataagacatgatctctatctgatcttcaaagccttcaacctggctttcgcctttgatattgtcgagctttaaaaaaatcgcatccatgatttatctccttgttgatcaggtggcagttcagcagccagacgaataccggcggccagcgcttgtgactcttattaaaagcgcaacgaccaaaaaacacagcgtgaaaagcgccaggtttgcagggattttgccgacgtttacccacgtctgatgaacgttattccgctggttgcaaagcaatagagggttttggcccgctgtggccaaatacaattgaggttatactgaacgctctctgccatattcaatcccttttatcgcaaagtatccctggtgccggtatcacagcgtcgttattcaaaaattgacatttcagaataataatcagctatatataaaaaacacatcaaaaagcaaatatcaacttaatttttacttatttaataaaaaaatccaaattgatttacatcaattaacacacacaaaaacattaaaaatcaaagggttaaatgaaaattaatcactatggaaattttatttttcttaatactcacattataaatgttatttgcttattatcctgtgaaaactaaaaaatgatttaaatcaaaaaacaaactattctcgttgattaacgttttgaccgaaataaaaaagattttatacgtcccgggatagtctccctttctgatggacaatatgcattaacgagcgggcaaacaggtaacttctgcccgggtaatccgttacccgactgatattaacattgtcatgaggtgatatcatttgcccggccagccataatcatccggaaccggcgctacgccacgaacatcaggacggagcattttttgtcgatcctcttcgtcatccacccagacactggctatctcttcacaggttgcaaaccatacgccatcatgccctttaatatgttcaatcaaacgtaacaacatcatcatatgatgcccatgaccgattatctgcggatgaagagccatcgcatataaactgttttcctgatggtgataagcataggtaaaaatatccttccagcgtcgcagaacaccgtcagtatcgctcatcccctcctggttgccggtatacgccagtgcgggaaaatcatccagataccagctaacaggaatttccagaatcgcgctggccgggcctgcgatatttcccgtctcccaattcacctgccaacgttgaggatggtaaggcacaagatctctcgccatcaggctactgtcatagagaaaaccggcttcctccagaagatccagcgtattctcgctataatcccaatagggagaacggtatcccacagggcgtatgccgaaatgtcttttataacaggcgaacgccagatccataagtcggcgttctgtatcacgattcaccagcgtcggattttcatgatagtagccatggtgagcgatttcatgcccggcatcaaaaattgctttaatgatttccgggaaggtgtctacagtgtgtccgggaataaaaaaggtggttttgatattattttctttgaacaatttcagaagccttggtacgccaacttgagcaccaaactctcctcgtgacataaaggatggcgacggtcgattaaatccgcccagccataaagactgagcatctacatcaacaccaagattgaccgcaatccttttaccctcaggtaattttaaatatcccataacgacctccagctaatacatagaagggacacattctgttatttaatgtgtgatggccagatattatatatgcctgcttttctgcgtctgtccttgaacgttgttgctgcccccccaagtctattttcatatagaacatcgaggttaatttctcctgaaatgacatcctcttgattgacgtgcgcctctgcgataataccttgtggatttttccacacgacatcacaggggcttaaaattgaacttcgggcccagcagcctggcagtggcccgcccgggtttcctcccaggcaacagtgaacaagataaatttgattttcaatacaacgtgcgtggcaacaatgcctgactcgccaaaatccctgttcagtaaacgtagcggaaggcgttaaaattaactccacaccctgttccgccagcgtcgcggcacactccggtatttctgcttcataacaaatattaaaacccacctttgcaaatggcagttgaaaaacagccattttatcgccttcctgagtataccaaccccgttcagccgggaagatatgcgtcttactgtgagcataatgttcgccatcgggtccccatatatgcgcaacattctcatagcgatctgctccagtctgctccagatgagagccagcaataatgaactgtcctctttctttcgcttcctgttgaaaaagctgcttataggcatccgtgaactgatcaattaaagtaaggtgtgaaatgggtctttcttgccattttcaatagtgtaaatagctcaatggtaaatagctccgggaagataacgacatcagctccctgacttttattaagaagtatccttacctttgttatgaaatcttcaaaagtgtttatttcggtaacaatatactgacaggctgaaacagtaaaattacgtggcatcgtgatatccccggcatgaaatttaaacttaaattaacgtatagcgcatggagaatattagggagtggacattacgacatcaggttattttttgtgaagctgcgcaaaatatatggagaaaagagtagaagcattgaacctttatttacataaaggggactttatcgatgatcgcagcgagacagagagtcgataaaaatccaggcgaaaaacaataacccttaccacaatattattttcagcatctgaaaataatcaggcaaactaaatgataacgcgctggtataaaaccaacgcgtatttttaccgataagggtaatgaagacggccacccgaaggtggccgttagaacccggtagcgcttcgcttatcaggcctgtgaaaccgagacagctttagcggtgagacgccagcggctgttccgtcattggcgggtggtgcttttccggatctttaatcagtacccacaggatgatggcgccgataatatcgaacagactgagtgcaatgaagaacgggccgtaaccgataatagcgaccaatgcccccataaacaggttgaagcttaactgtcccatccatgccgcagatcctgccagaccggcaaccgtcgcgacctcatttttcttgaacaggtcagcgctcatggtaatcacgacggtagacagcgtctggtgcgcaaaaccgccaatactcatcaatgcaatggcgacatacgggttagtcgtaatgctgacaaaaccgatcgaaatcatcaaaacagcgccgatggtaaagctacaacgacgcgcattgatcgtggtcatgtgcatcttttccatgaagaacttcgccaggaaaccgcctgcaacgcagccgaagtccgccgccaggaacggcagccaggcaaacatggcgatctcttttaacggcagatgcatcacgttaatcagatacagcggcatccagaaactcagcgttccccatgccgggtcagcaagaaaacgggtaatcgccaatgcccagaagttacgctttttaacgatctctttaacggccggttttttattatcgtcctggagatagctttcctggccgtcttcgatataacgcagctctttgtgggtgatccacgggtgtttatttggcgagttataaatcaggaaccaggtgatggcgaacagcacgccgatcccaccggtaatcacaaacgccatttcagtaccgatgccgctatcagcaaaggtcagcatcgcccagaccaccagcggcggcgccagcatcgcgccaattgaagtaccgatattaaacaggccccccgcaataccgcgttctttcgtcgggaaccattcggcgctggctttaatcccggccggaatcgctgacgcttcggttagccccatcagaccacgcagaaatgccagacttatccagccgccggccagcgcgtgcgccatgttgatcagcgaccacaacaaggcaaagataaagaagccgattttcagtccgatgacatccatcaaatagccggtgatcggctgcgcaatggtgtaacaaagctggaaggcgctcaccacccaggaatattgttgctcatcaaaatggagttctttcatcatcgctggcgccgcaacgctaagcgagctacgggacaggtagtttacgatggtccctacgcagaccaggccgataatccaccatcttaattttgtcatcttcatgataaagcctcgttaaaaaacattagctccgcgccgtctgacctgtagcgggaaaactgaaatcacaaaaattggttgaccaatcaatattttctcatccggaccggtcaaaatctggcggcaactcccgcctttaatattcttgaaataaatacatcaactcatttcaagttgaatggtgaatgctttccacccagcaaaaattgacacagatcaaataaataaaattggcagaccgtgaatgatgatatttgtgatttggttagccaatttagacaataaggttgacatgagaaaaattttggttgaatttagggggcagaacgggtttacaaagcacgtttcgaagttggctggcaatgggtcaaccacgaagacgttatcgcaagaagaggaaacgagatatgaaacaaacctggcgctggtacggacctaacgacccggtaacgctgtcagatgtacgccaggctggcgcaaccggcgtggtaacggcgttacaccatatcccgaatggagaaatttggtcggtagacgagatccagaaacgtaaagctatcgttgaagaggcgggtctggagtggtctgtggtagagagcgtacctatccacgaagatatcaaaacccacaccggtcagtacgatttatggatcaaaaactaccagcaaacgctgcgtaacctggcgcaatgcggtatctatacggtttgctataactttatgccggtactggactggacacgtacggatctggaatacgtattaccggatggttccaaagcgttgcgttttgaccagattgaattcgccgcgttcgaactgcatatcctgaagcgtccgggagcagaagccgactatacggcagaagagattgctcaggcagagcggcgtttcgccaccatgagcgaggaagacaaagcacgtctgacccgcaacattattgccggtttacctggcgcggaagaaggctatacgctggatcagttccgtcaacacctggcgacgtataaagatatcgataaagcaaaactgcgtgaacattttgcctatttcctgaaagccattattccggttgccgacgaggttggcgtgcgtatggccgttcaccctgacgatccgccgcgccctattctcggcctgccgcgcattgtctctaccattgaagacatgcaatggatggtggaaaccgttaatagcatggcgaacggcttcaccatgtgtaccggatcttacggcgtgcgcgccgacaacgatctggttgatatgatcaaacagtttggtccgcgcatctactttacgcatctgcgctctacgctgcgcgaagagaatccgaagaccttccacgaggccgcccatttgcacggcgatgtggatatgtatgaagtcgttaaagcgattgtggaagaagagcaccgtcgtaaagccgaaggtagcgacgatctgatcccaatgcgcccggaccacggtcatcagatgctggacgatctgaagaagaaaacgaatccgggttattccgccattggccgtctgaaagggcttgcggaagtccgcggcgtcgaactggctatccagcgcgctttctttagcaaataaccttctttcgcatggcgcgacgcgtcatgcgatttcccctactcaatgcaatagcaacatgcctcgccccggagatcgcgggcgaagacgtcgaatgacaggagtttgcaatggaacagaatatcgccaccgcccaggtttccgtcgcccgcccaaactgggacaaatcacgtctggtatcccgtattgtgcatctgggctgcggggcgtttcaccgcgcgcaccaggcgctctttacccatcatctactggaaaagagcgacagcgactggggcatttgtgaagtgaacctgatgccgggtaacgacgcgcggctgatcgcgaacctgaaagcgcaaaatctgctgtacaccgttgcagaacgcggcgcagaaagcaccgaactgaaaattatcggttcaatgaaagaagcgctacaccctgaattcgacggtcatgcagggattctggcggcaatggcgcgcccggaaaccgccatcgtctccttaaccgtgaccgaaaaaggctactgcaccgaccccgccagcggcgagcttgatgtcaataacccgctgatccaaaacgatcttgcccatccacagcagcctaaatccgccattggctatattgtcgaagcgctaaacatgcgccgggagcaaggactgaaagcttttaccgtgctgtcgtgcgataacgtgcgcgagaatggtcacgtcgcgaaggctgctgtcctcggcctggcgaaagctcgcgatgccgccctcgccgcatggattgccgacaatgtgaccttcccctgcaccatggttgaccgcattgttccggcagcgaccgaagagacgctacaactggttgccgaccagttaggcgtttatgatccctgcgctatcgcctgcgaacccttccgccagtgggtcatcgaagataactttgtgaatggtcgcccggactgggataccgtcggcgcgcaattcgttgcagatgtcgtaccgtttgagatgatgaagctgcgtatgcttaacggcagtcactctttcctcgcctatctgggttatctcggcgggtatgacactatcgccgatactatgactaacccggcttaccgtcgcgcggcgctggcgctgatgcttgatgaacaagcgccgacgttgtcaatgccggaaggcaccgatctggaagggtatgcgaatttgttgattgcgcgtttcactaacccctcgttgaaacaccgcacctggcagatcgcgatggatggcagtcagaaactgccgcagcgtttgttggacccggtacgtctgcacttgcaacagggcgatgactatcgccgcctgacgctgggcgtcgccggatggatgcgttatgtcggcggtgtcgatgagcaaggtaaaaccattgatgtcgtcgatccgctgcttgcacagtatcaggcgattcatcagcaatatcagacgccggaagaacgcgttcgcgggctactggccatcgagtctatctttggcaacgacctgccgaagaaccacgaatttgtgcaagccgttaccgacgcttaccaacagctattgcagaatggcgcgaaagccacggtagaagcgctggctaagtaaggagataaatcatggctacgtttatgactgaagattttctactgaaaaacgacattgcccgcacgctgtaccataaatacgccgcgcccatgccgatttatgacttccactgccatttaagtccgcaggaaatcgccgacgatcgccgtttcgataacctcggtcagatctggctggaaggcgaccactataaatggcgagcgctacgaagcgcaggcgtggatgagtcgctgatcaccggcaaagagaccagcgattatgaaaaatatatggcctgggccaataccgtaccaaaaacgctgggtaatccgctgtatcactggacgcaccttgaactacgccgtccatttggcattacaggtacgctgttcggaccggataccgcagaaagtatctggacgcagtgtaatgagaaactggcgacgccggccttttccgcgcgcggtattatgcagcagatgaatgtgcggatggtcggaaccaccgacgacccgatagattctctggaatatcaccgccagatagccgccgacgacagcattgatattgaagtcgcgccaagctggcgccccgacaaagttttcaaaatcgaactggacggctttgtcgattacctgaggaaactggaagcggcggcagatgtcagcattacccgtttcgacgatttacgtcaggcgctcactcgccgcctcgaccatttcgccgcctgcggctgccgcgcgtcggatcatggcattgaaacgctgcgatttgcgccggtgcccgacgacgcgcagcttgacgccattctgggcaaacgtctggctggcgaaacgctgagcgaacttgagatcgcccagtttaccacggcggtgctggtctggctgggccgccagtacgccgcgcgcggctgggtgatgcagctacatattggcgcgatccgtaacaataatacccgaatgttccgcctgctggggccggataccggctttgactccattggcgataataacattagctgggcgctctcccgtttgctcgacagtatggatgtgaccaatgaactgcccaagactatcctctattgcctgaacccacgtgataacgaagtcctggcgaccatgatcggtaacttccaggggccgggaattgccggaaaagtgcagtttggttccggctggtggtttaacgatcagaaagacggtatgctgcgccaactggagcaactgtcgcaaatgggactgttaagtcagtttgtcgggatgctgaccgactcccgcagtttcctttcttatacgcgacatgaatatttccgtcgtattctctgtaacctgctgggacagtgggcgcaggacggagagattcctgatgatgaagcgatgctaagccgtatggttcaggatatctgcttcaataatgcccaacgttatttcacgattaaataatcgctattaatctgtgagcacaggtttcaggtattttgagaggcaggaaggcggtaagagagtgagaaatttagcagtaacgcacttttccagccaaagtctggccgccgataaaaagcaaagaggttactgattaatcccgaatcacttactaaggtaagtgattcgggtaaacaaacacagccatcttctgcgtcatgctttttttctctgtccggaataactccagtgcagaaagagtgatacatcagtcctgttgatgatggatcctgtgggttatacggtaataacttatgacttcacagtgtggtttcttttaacaaatcgacagccagcatttccagctggttaaccacctcattactggatcgctccattctgtcgagttcttgcgacatcgcattcatatcgcctgcggcaaaatagttcagcgcagagtgaccagcggtatgcacctctttatgcggcgcttccagactacggaaactgtagtaattgctaaactgctgcccttcaaaaccgtagtaccatttccccagccgacactgatcgtgcatcgttattttactgtttatgtctttatttaagagtaatttgtagacttccattttccagataacatggtcaactttgacaatattcaaaaactgcaccgtagagatgtactgcatgaccgatttcatgctcagcgatttatcgatgacgatgccaatagactccacaatttgatttatgttagtcgtaatattatcaataaccggctgttggttatccagcacctcactcactctggccgtattatctttgattacagaggttaacgtactgacgcttttcgaactgtgtttaacatcttcggacaggtttttcacctctttcgaaataacgctaaaaccacgcccggcatcccctacgcgcgcggcctcgatcgcggagttaatcgctatcaaattggtctggttagcgatcttctgtatctctttaatacacgcattaatttgcgttaaggaggtatttaagtcgcccatacgacagccaatatccgatgaagtcgtgccaatttcggtgataaattccacgagcgattttaatgaacttctggctttatcattctgttcattaagttcattaatgcgttctttttcaatgttgagctgctcacaggatttaatgatggcattacgaatgatatcgatcgtcgagatccccatcagaattttttgacacagtatccgctcataaggctcaggagtatccaccaccacgtcagacgcattagcgccagattctgctgctggcggcggtattttgacaacattattattccagtggcgcaagcctaatacttttttaaacatataccattctccttattatatgtggacatcctgatctatgcctggataaagtattatcaactcatgctaacataatgaaaaatcggctgtcatctgccataaccatacgctcaccagaataagacaaaacgtccaccaaacttaaataattacaaggtaaactattcaacaataccattaatagtcatgatggaagtcgcttcgctttatacggaaatattatttacaaggctgacaataatagctgaataataattaactgcatttacttaggtgtatctatatctcggcccgaagattgcaaacagggtttaaacgcaaacttttgcaatagaaaaataacctaacgtaaactttttatatgaccaataatatcatttggactcatcaatatattatgctgtccgtttaccagccaaacaggcatgacctaaatccaaaggaatgggggcagcgtaaccagccgcaaaaagtatcgattagtcgaaaatcaggaaacggatgcgccaacgaggcgagcgtcaccgcctgcgtcagaaaagttaagaataatttgtgatattatttctcatatgttaccagtaaatggcaggctgatagcccttcgctggtaaacacaacaggcgggatatcggcacccacgccgatatcccgacgagaatgaccccgttacgctttgatgacgattaacggttcaatatcgctctcttttttaatgactaatgaatcatcgccgcgcaggcacgtaccgccgtagttaccgcccacggtaaacgtacagacctgaatatacttcccggcgaccttcggcaggcaccacaactgctgatagatatttttctgcgtggcgaacttgccgctggttttatccagtagctcttcctgatggctcaccaaatcgatattactaccgcaacgtccggctatcggttttaccgcatagccggtctgcaccagctcatcgttaacggtaaaatccgtgtcgagcaaatagcgatgatgcgggaacagcgaccacaggataggcaggatcgctttgttgcccgggatcaccgtccacagcggttcaaacaccaacacttccgggcgcagtaatacatcaatcagccggacttcattttccgggtgcccggtacgaataggcactgcggcatactccgtctcgctgacttcgcgtatctgctccatcgccgtttcccacgcccaggttttccagacacaattcaccagccgtccgtcgccatcgatcaactgcccggcgtcatcccagcgcaactcgcccagcccgcggaggattttgctcgcgaagccggcctgatgcagcgcctgctgcataaactgcgcgtgatagtcctcctcgatatcatcatcctgcatgatatggacgaaaggacgcgctttactgtgtttccaggcgcctgccagctcgttaattaagccctctgccgggttatgccctttaccggtatagccctgctcagcccatttttcgagaattaatcccgcttcggtatggcatgatgcggaatcggcattgtattcatagactttcagcccgcgttcatccatgcagaaatccatacgaccggtgatcatatggtgacgacggcgctgccaggagaggcgcagacgcggccaaagaattttggggatatcgaatagcgccagcagattatcgtcttttaaaactttgtccgtggcgtgcaggtacatcaaatgcaactcattggtcgctttgataagctcctgttcagcgctctcggtgatggtaaaatactggtacgggtcctgattgataacgtgcccgttcgcctgtacataggctttttgtaacggatcgcgctcatccagccactgaccgtcaaactgacctttctctggcagtcttgcgccgcgaatcgccagcgactgattcgcgatgtcaggctgtgacaaactgtattgcgtgtcttcggtctggatcatccagcctaaaatcgtcgtgtcatcaaaggtgtcgcgcagggtgtaacacccgttttctacgaccatttccagttcgcgagtccactgctgccctggcggcaatggcgtgtggataacgttttgctcagcaatacgaattttgttatccaggagttgggtgataatcgcgacgtgcccggtttcgttaaactcgccgcccttttgccagatgagcagcgccccggcctccggcgcgcgcggcgaaccgttcgggaaggcctgcaaaggcaaaatattgtcattcacgacctcgcgcagaaaacgtagcgagaagatttcccaggccatgccgacgtcagtaaaaacaacgccataattcagaaagagaaaacggcgggcaaattccacgcactgccatttatgccccatgtattcatcgtcgatgtagctacgaaaagctgcgtcgtcgtcgtcccacggatcgagggaattgtaatctgaagagtagatcgctacgccgccgggggcgtaacccaataatgtcccgaagggggcatcctgactggtggttcctttgctcatgcacttacctcaaaacaagaccgcctgagcagcctggcgtgatttcgctctgattgtctgctctgtgacactaaccggacagaggtcgacataatcatacacctcaataaggcacactgaggccagaaggttaaaatttcactcgccggaatgtcccaatcggttaaatgtccggttagcaagctgctacactgcttcaacaccaccactgtgaaggcaggtcaatatggcagataatacttatcaacccgcaaaagtctggacgtgggataaatccggcggcggcgcgttcgctaacattaatcgcccggtttccggcccgacgcacgacaaaacgctgcccgtcggcaaacatccgttacagctttattcgctggggacgcctaacggccagaaagtgactattatgctggaagagctcctggcgctgggcgtgaccggcgccgaatatgacgcctggttgattcgcatcggcgagggcgatcagttctccagcggctttgttgacatcaatccgaactcaaaaatcccggcgctgcgcgataactcacacaacccgccgattcgagtttttgagtcgggcgcaattcttgtttatctggcggataagtttggccatttcctgccgcaggatctggctaagcgcacagaaacccttaactggttgttctggctacagggcgcggcgccgttcctcggtggcggtttcggtcatttctatcattatgcgccggtaaaaattgagtacgccattaatcgcttcaccatggaagccaagcgtctgctggacgtgctggataagcagttagctcaccacccgtatgtcgcgggagaagagtacactattgccgatatggccatctggccgtggttcggcaacgtggtgctggggaatgtctatgatgcagcggagtttctggatgccggaagttatcaaaacgtacaacgctgggcgaaacaggtagccgaacgtccggcggtaaagcgggggcgcattgtcaaccggaccaacggcccattgaacgaacagcttcacgaacgccatgacgccagcgacttcgaaaaccataccgaagataaacgtcaaagttaaaccataatgccggatggggtagtaatgtcgtcatccggcatggtattccctgctgacgcttcgcttatcagttctgcgagtgcgtcatattcggcgcttcactaaacccatgttgcatgagaatcaacctcgcccgtgctgacagtaaaaagtcggcaagcgtttttccctgctcgctcaggcaggcaaagccatattcagccacgggattataaggttccgggatatcaaccactcgcagcgaattaacctgccgtagccagggagcatagctggcatagccgataaagatatcggtgtaatcatgattgatgagccattccgctgccagccggcccgccggtaacggcaaagtctgcctgccgccaaccagcgctaccgcgcgttttcggaccgcttcgccctccttgcccatccgcgaaaaaagctgctgcgtataatcgccggaaggatcgcaacctgctgttgaggtgccgatccgcagatcccgccgggttaatagcgacaaccagtcctcgccttcacgcatcgcctgtgcccgcacgctcaggcacaaacggttcgtcgtaaaaggcgcgacccgcagcgcccgcccgctttccagcagcgcctgcggatgcgccaggttcgccgaagcaaaaaagtcgcacgcttcgcccgcttcgatgcgttcacgtaacagccccgccggaccgaaatcacataccgcatccgcctgaaacgccgccattagctgcggccagacgacgcgcaagctccccgcagccagtattcgcattattgtacgccctgatagtcagtacggtaaaaacgttgataccagtcgttagcggccttttgcatgtcaatatcgtggaatttttccggatagagttttttcgccatccacagttcgccgattcccaccgcctccggcatcggatatccccaggctttggcataatccggcatcaggtaaacccgatgatgcttcaccgcgtcaatgacctgccactggggattgtgcaggatctcattgacgacctttggatagcgattctggacaaagatcacctgtggatcccaggcgatcacctgctccattgtcacctgcttaaagcctttcaccgaggatgccgctacattcagcgcccccgcatgggccatcatcagaccggtgtatttaccggaaccgtaggtggtcagctccggattcgccatataggcgcgaactcgctcattttcagggaccgactgcaaacggtcgctgaccatcttgcgacctttatccatcgcctcaatcagcgctttcgcctcttgcggtttattgacgatatcgccaatcagcgttattccttcacgcagcccgcgattataagcctgctcttcatcggccagggtcgggttcattttagcctgctcgccagcaatatcatggcgcagcgaaatcgccactaccggaatgccaagacggctgatcttgtcgatcatctcctgcggagcgtaattcgtgacaaacaccacctgcgggcgcagcgccaccagtttttcaggatcaacgtgcgttagatcgcccagcgaggctttttgcgccagttccggcgccagacgcgcatagccgtcgcctaattgctgtttccagttcgccatgaccccaacgattttgtcagtggcattcatctgtacaaggagattgagcgtttgatgctggagcaccaccactctgtcgacggtgtccggaaccgtgacctggcggccaatttgatcggtaaaagtacgcgccgcctgtgacattaacggccagcaaaaaagcaacgccagcagagagagctggcgcaaaaatttattcataggtttcgccccataatcgatatataaataattatataacgattatagagcgatataatagaggtgattaagggatcacgcgctggtgatgtcgtactccatgcggcgcagcgcatctaacgtggctttcgcttcgtcttcgtcaatgatgctcatggcaaaaccaacgtgtaccaatacccattgccctatcagatcggctggcttaccttcacaaatcagagcaatattgacatcacgtttgatgccacacacttccacctgcgcaagctggtgaatatcatctccgacggccagcacctgaccggggacgccaatacacataattaaccacctgaaataaaatgcgggttattcgacctcaatactttttactttcaacgaatcgccggtatccacccgcaggcgatcgccatgacaatgcggacattgcgcgtcatgcctgagaatttccaccacctgactgcaatcccagcaccaggcctgggccggtctgtagtcgatgtgcaattcgcacccttgcgctaaagtcccctggcaggcgatatcaaaactgaaacgaaccgcgcgctcttcaacgcacgaaagcgcgcctatctccagccatacgccggtgacgcgcgccacgccgtgctgttctgcctgctgctgaataatttcaacggcgctttggcaaagagacagctcatgcattctcacagctccgacggccaaacagcaacgcacgccggcttgtctgcggcgcatcaggattgcttaccggcagagataacagcatccgcgcgcagtcatccgccagccggacgccctcttccggcgacaggctacgggaaagcggcgacatcaacgagcaggcaagatattgcgaaacgccttccagttcgccaacggtaaaggtcatcgtgccataaggcagttgcagaccgagtttttcaccgacggtacgcctgggccagatctggtccgggccagggaagattaatgcgcttaacatccacggcgtaattaccgtgcccgtccattgtccttcaaataacgtaaaatcagagacatgcactggcatagtcggatgcagaaacgaaagatcgtgcatcgaacgatgggctatctcttcaaacgccgcctgaacccgggcgacgggcgccgtgtcgaatccggaaaacgtttcagacatgcgccgtctccttaggaattgcttcgacgccggattcacgcagcgcagcaagaacctgctcaagcgcaggctcaatcatcgcctcgacggttggcgttaagccgatgtgcggttccagcgactgtggaataacgccaaccagggtcagtttcttcggaaactcgccggtaaagcggagggccgacaatacgtcggccagtccaagctgatggggggagattttgttggtgaacagcgccggaacttcatcgtcgcgcagtaccataatggttcccggcgcgttctttttcgacacgatggcgtcggcaatgatcaaatgatcacgattcgccatatcgccaagaagttccattcccgccgtaccgccatccagaatctcaacgaaatccggcagggtgtatcgttgctctaacgcttcaacaatacgcaccccgatggcttcatcggtcagcaaaatattgccgacccctaagactaatatccgcattacaaaaccttcaccgagaccacttcattgccatcggcgtccaccacgtgtaccgcgcacgccatgcaagggtcgaaggagtggatggtacgtaccacttccagcggcttcgccggatcggcgatcggcgtaccgaccagcgactgttcgtacggccccacgtcatcgttgaagttacgcggacctgagttccaggtcgatggcaccactgcctgatagttactgataataccgtctttaatcaccatccagtgagacagcataccgcgcggcgcctccaggaagcccacgcctttgaactcgcccgtcgccggaatgttcggcttcacaaacgtggtgtaatcgcctttgccgatatttacaatcagcgcgttgtattgatcctgcaatatgttttgcagttcacaacagtgaacggtacgcccgatgatacgacccagcgtagagtgaagttgcgccatttccagcgttttgccggtcagcttctgataaagcgcaatgatttcattgagcttggtctgcgtggattcacgacctgcagccagtttacacagcatgttcgccagcggcccgacttcgacggttttgccgtagaatgtcggcgacttgacccatgagtatttaccgtcatccgaccaaccgtcgtaagccgggatcgtagtgccttcccacggcgcctgcggcgcttcatctttgtaccaggcgtgcttcgcgctctcctgaatacctttaatcaggaactcgtcggagtgagaggtgatcggacggtatgtcgacagatcggcattggtaatgtaaccgcccgggaacaggaaactgccgtttttaccgtcggtcgggaattccggcgcgctcaggtagttcaccgcgcctttgccacgctccagccattccggatagtaggccgcgatgactgcggtatccactttatacacctgctcgacaaaatcgctcagcttatcaataaacgatttgatgtacatcaggcgttcaaggttcaacgtaccgatgctgtcgagattgatcgggttcgccaccccaccgaccgccaggttctggatatgcggcgatttaccgcccagcaacgccaccacgcggttagcgtcacgctgacattccagcgcctgcagatagtgagcgaccgcaatcaggttgacctccggcggtaactgcattgccgggtgcccccagtagccgttggcgaaaatacctaactgaccgctggcgacaagatccttgatcttgttctgaactttcgtgaactcttgcgcgctgttcaggtgccagctcgacacaccatccagcatcgcggaggctttttccggatcggctttcagcgcagaggtaatgtccacccagtccagcgcagagagctggtagaaatggacaatgtggtcatgggtggtatgcgccgccagaataatattacggatatactgcgcgttgacgggaacatcaatattcagcgcgctttccgccgcacgaacggaggagatcgcgtgagttgtcgtacaaacgccgcaaatacgctgcacaatcatccacgcatcgcgcggatcgcggttcttcacgatctcttccataccgcgccacatggtgccggacgcccatgctttggatacgacgccgttctcaatttcgcagtcaatgcgtaaatgaccctcaatacgggttaccggatcaatagtaattctctggctcatgctttgctcgcctcatgacgattatgatcgttttgttttaaaggaggaagtatcggcagtagacgaatgagtacgatgtatgcacaaatctcaatggccacaaaaccaatagaaatcaacaattcttcccaggttgggaagtagtggtagccgccacccgggttgaatgccaccagcgaataggtcagacgccacgtcgcgcagcccaacagcgcgctcagcgccgacaggtacagcatacgagagtcattacgcagtttcgccacacgcagcaccactaacgggaagaccatcaggacgacttcaatccagaacatagcggagtaaaaatcgccggcaaacgcataggacagcttgtcgcgataaatcagttcgccaaagcgcaggacgacgaaaatcgccagcagcacgctgatggtattcgtcagcttaacaaacaaatttttctcatccggaccgtttcctttcaggcctgcctgaaccagcgaaccctcaaatatgacaatggagaagcccatgataaacgcggtcagaaccgagaacagcggcagcatttcatagctttgccatagcggatgcactttatagcccgccgagatcatcaatgaccccattgaggactggtgcatcgtcggcagcagcgcgcccagcgcgataataaagaacatcaccttattcagacgcttgagcgacactttccagcccagacgttcaaacagggcaggcgcaaactccagcgccatcacgccgatgtagatggtcatacagaccgccgtctcaaacagtaccgagttcacgttgaagtgacctggaatgtagaagtacggcaggttccagtaacgaccgacgtcgatagtgatcgacaggccgcccagcgagtaaccaaacaagcttgccagcaacgccgggcgcaccaacggatggtattgcccacggttaaagacatacaccgcccatgccaacgcccaaccgccgcaggcaaagccggtgccgatcaacaggtcaaaggcaatccagacgccccacgggaaaccgccgttcaggtcggaaacggagcccaacccgaagaccagacgcttcacgataaggagcatacacaggacgattaacggtccaaaaataatgaccggtttactgatgatttttccgcccagcggttttggatcatgactcatgatcgtctcctccatcgtgatggtcgtttttgctattacgacgaaccagcacggttaagcccgccagcgcagccaggggtagtatcatgcctttataaagcgtgtgttgaacatgctcggagcgcgctccggttgaaaggtcatccagcttcggcagatccagatcttcataaggaacgcctgtcagcaccagcacctgagtaccaccgccctctttttcaccgtagaggtgtgggtagtatttaggcaccgtatgcagataggtgtcgtccgttttcaacgtctggcgcggatagtgatattcactgcctggtttgagggccagacgttttttcgcttccgccatcagctcttcacgagtaccgaaaatgacggcccctgccggacaaacttccacacacccaggcaaaccgcctttatccagacgctcaacgcctttctggttacacaactcacacttgtgaagcgcgccaaacgggttgttgtagtcgtacttaggtacgttgtacgggcaggcaaccatacagtaacggcagccggtgcagacatctttgtcatagtggacgatgccggttttcggatcttttttcagcgccgacaccgggcaaacggaaacgcagttaggatcgacgcagtgcatacactgtttcttgatgtaggcatagccgttctcttcctgatctttgttcacgcccgtaccgctacgccatacctgaataatgttattggtatacggcgacagcttgtcgttgttcgaccaggtctgctccccttccgggttacgcgccgggaagttgatatcctgacactttgtgacgcaggcctgacagcccacgcacagagtggagtcatacagcatacccagcgaacctggaatcggcggacggttttctgcagccgcatggctgacagacggcgcggcgcccaacagcaatgctccaccggaggctgctttaataaagtcacgtctgttcacggttattctccccgtgagtcagcgttatctttcttttgctgacgccccagttcacgtaccgccatcacgctgacgccggcaaccagaccgactacgccgccaagcagaccgacagcgcccgcagagatattgccgccttctttcatattgacgtcaggtttctctgaacgcggagtttggttttcgacatgagcaagctggtgaatgcccttatggaagccgataccttcttcgttacagccatagcaaggatgaccgatcgccactggccagacgccgccaacgtcacagaactgtaacgtagaacagttgccccaggtttccggccctttacagccaagatggtagagacaccagccctgacggtggccttcgtcgccaaattctttggcaaaacggcctgcgtcgaagtgtggacgacgttcgcaatgctcatgaatcagacggccataggcaaaggttggacgatttttcgcatccagcttcggcggcgtgccgtaagtgatgatatgcgcgacggtcgccaggaagttatgcgggtttggcggacaacctggaatattgataaccgttttgcccggtaagacttcctgcagactgacagcgccggttgggtttacgccagccgcagcaacgccgccccatgccgagcaggaaccgatagcgataatcgcggctgcgccatcagcggctttgcggatgtgatccacgatcggctcgccggcaaccatgcagtagataccgttatcttttagtgggatagaaccatccaccaccagaacatattgccctttatacttctccagagcgttatgtttgttttcttcgacctggtgaccgaatgcggcggaaagcacctcgtggtattccagagagatggtctccagaacgaggttttcaacggttgggtgtgtagcacgaagcagtgattcggtacaaccggtacactcctgagcgccaatccagataacgggcggacgctgtggattggataccgattctgccatttctgcggcggctttgctactgagccccatagtagcggccagtgctgcacaaagcttcatgaaatcacgacggttaatgccgtgagaagtgatgagagtattatctccagtcattttatagttattccgttacgaagacctggcttttattttgcactgttcgcgaagaagttattgcgatcggtacgccatttaccacactttttttatggttatgtgcgccataatacttcgacggaacagtaaaacgaagggaagaggcgatagtgtaattaattaaagcaagataatacccctgttggatcaaccttcgagtcgataaccggccataaagaagcgaaccgccatcccggaatgattctctttaaagaaatccatcaccatttctttatccagaccatagcgacgcgtcagaattccagcctcccacgcgctaagttgacgatcgccggtcttttcgaacatacggtgtgtaaaacccaatacaaagccacgtttatactcagaacagaaattcaccgcatgatgcgcgctatatgcatatggcgcgtgcaacccggccattaaccctttcccaaaatgattattcatctgacctccttagtcgctatataataaattatatagcgactaattaaatgaaggccagcgcattacgcgcttttttgcttcacatcagaaggaaacccattcatcagtagactgtgcgggagccgacgccattctctgaacgccaggcgccgctttcgccgttacgcgttgttgcggctcactagcggaaagccggaactgctgtacggagcgttgcaaatcctccgtctgccgttccagcgccgccgccgccgcggaaacctgctcaaccagcgcggcgttttgttgcgtaacgctatccatttgcgtgatcgccacgccaacctgagaaatacctttactctgttcttcggaggcggacgcgatctgtttcataatcgtcgtcacttccgtgacgccgcgcaggatggcgtccatcgtcgcgccggtctcctggaccaactgcgcgccctgcgctacgcgacgtaccgattcgccaattaaggcttcaatttctttcgccgcccccgcgctgcggctggccaggttacgtacctcaccggcgaccaccgcgaagccgcgtccctgctcgcccgctctggccgcttctaccgctgcgttcaaggccagaatattggtctggaaagcaatactattaatcacggtagtaatttcggcgatctgctgcgaactggcggaaataccgttcattgtttctaccacatcggaaaccagttcaccgccttttcctgccgttagcgaggcggcatccgcaagctgactcgcctggcgagcgtgttcggcgttcattttcaccgttgcggtaagctgttccatgctggcggcagtttcttccagcgcggcggcctgttcttccgttcgggaagagagatcgttattaccggtagaaatttccgtcgcgccgcgccagatattgtcgcttccggcgcggatcgtactcacggcttcgcgtaaactgtcctgcatcgcgcgtagtagcggcaccaaccggcctacgcagttacgccccaacgcttcaatcggctggctaagatcgccttgcgcgatgcgctgaaactgctgacggatgcgctccagcggtttcaccatcattgcaaccagatagcgatcggtaaaaatcaggatagcaatgcccagaatcaccgccgtgataagcaggatgcggatggtataggttttaccatcgaccatcacacgtgtgttatccagcatggcgccagcttcatgactaaaccgttccgcgctggcgccgaacgcgcgactgagtgcgggcgtgaccgtactggcatgttcgctccaggcggtcagcgatccttgctgcgccagttgcatttgaggaacgacgcctttctccagcaaggcctgccagttggacaagacctcccttgagatatcagggttcatcggccctggcgatagcgctttcatctcctccagcttctgacgcatattctcgagcgactgccgggcgggcgcaaaatcgggcgtgccgccgccgatttttacatccatcgcgcggctaaggcgggtaacaaagcggaaatattgatcgttaccctggcttagcaccgtcatttgccgcacaagatgccggtcaatatcatttccttccgaaacttcggataaagcatggacgctgtataaccccacccccgaccagagtagacaaaaaagtcccagtatcgtcagcatgaccatacgaatagtaaagttttgcagcaaacgcatatgaatttccttgctgaatataagagattagtcatcagacgatgacgcactctcgttatcggcaaggcgcggagaatatataatgcattctccatttttttacagttaccgccgtttacgtacccgcagatgttatatatctgtgaacgcagagaaaatctttcagtgttattactgagtaaatgaatagatgtagtaaaaatattgcgtaaggctgcagggagacggttatccaccgttaaagaagcgctgttttacagccgggctcagcatcctttgcccgactgccccgccgttgacggcggctcaatggttatgccgcgtcaatctgtccagatagcccatcacaaacgccgacaggacaaaggtcagatggatgatgacataccacattaatttgttatccgggacgtttttcgcgtccataaacacgcgtaacaggtgaatggaagagatagcgactatcgatgccgccaccttattttttagcgacgtcgcatccattttccccagccagttcagcttctccttgcccgcagagatatccagctgagagacaaaattctcatacccggagaacatgaccattaccagcaatccgccaaccagcgtcatatcaaccagcgataacagcaccaggatcagatcggcctccgccagggcaaaaacgttcggcagaacgtgtagaatttcctggaaaaattttagcgctaaagcgatcagcgccaaagagaggccaaaatacaccggcgcgagcagccagcgagacgcatacattacattttcaagaaagcgttccatagggacctgtcaggtaactaaaaccagcaacagtatatctcaaccatgcaacatcagatcaacatgccagttaagagcctatcccaccaggcgttattggcgcagccagtttggacacggacagcgcgcaaaaaccggagcgtacacgtagtacgtgaggtttgactcgctacgctcgcccttcgggccgccgctagcggcgttcaaaacgctaacgcgttttggcgagcactgcccaggtccaaaatggcaagtaaaatagccctaatgggataggctctaaatctcatccgggttaacctgcgggcgctgatattccggccataccagcgcgaccaatgccgggtaggcttcaagactgaactcgcgaaaacactggcgtaaattaaggacgtccaaatccgaatacggcaccttttctccgttcagacaacgcttctttatattgtcgtaatacttataaacggcagagttaaggtcgctgcaacgacgctgtgcgtcaaataatccaggcgtttcattcaactcagtcattgtcattcgttttatcgttgcatgaaggaaatcgatatattcatggttaacgcgccagtaccataccggcgttatcgaattcattaatactgagaaatgatcttcgccctcttcctttgtcatgggttcagtttgatttaaatttacgatttttccaccaggacgttttttattaacctcccacatcaggaagagtatcgcgccggtcagtaatagcaatataataacagaataaaaaatactgttcatagcaggctccattttttttgattttaaaattacgccatgttattgtcaacgaaacctacactattaaaaatagtataccactgatcgtaaaggatatttagtcatgcttcctgagcatctggtttcctctcattttcgcctgtcatcgccgccccctgaagccacagaaaacagtaaaaatttgcctaagggaaagacaaaactcagcgattacgagcccgatattttaattagcgctaacgctgccgggcaacacagaaacgtattatttgaagaacgcgaccgtcatattaaagaacgtctgtattgtgtggctaaaattgaaacgtttgcccgcctgataaacgcactacaggcagaaggcgatattgatgcccaaacgctaagtaaaatactggcggataaaaccgcaatgataaatgaaaaaggcaatgccatttggcttaatttaatcactcgcgaaaccgatatgccgctattttattcactggaagataaagatgaaagaagttgaagacaataacgtttatttggctttagacaaccataaaagtgatgaatttatcttaaagcaaaatcttgcagcgctaatcgccagcaaaaatgccaccctggaaaaggtaacgcaggaggtggtatccataccggcggcgttagtacgcctgaagtggcaaaaccgacgggagatgtatgcgttacaggtcaaagaggagatttatggcgcgaccatcaatgccattatcgagcagcatcctgaattacgagacaaaattatgtctcgtcttgaaagtgactggcagcatctgctggctcgcgagacggcaaccttacgtctgacgcgtaagctttccgatggcgactaccggacgcgcaacgtcaccaccgtcgcacggcaagaaaaataaccttcatggctagttaactctgttgtgaatacgggcgaagcataaggatcgttctgattctccctcttacggtagtaaaagtgtctacgcttaaagggtgttcaacctgaagggagaagctcaatgtctcatctatacgaccctaccacgcagtattacaccggcgagtatcctaagcaaaaacagccggcgcccggcgtccaggcgaaaatgacgcctgttcctgactgtggtgaaaaaagttatgtcggcagtggtcgccttaaagatcgtaaggcgctggtgacagggggcgactccgggattgggcgcgctgccgctatcgcttacgcgcgtgaaggcgcagatgtcgcgatcaactatctgccagcggaagaagaggacgcccagcaggttaaagcgctgattgaggagtgcggccgtaaagcggtgttattgccaggcgatcttagcgacgaatctttcgcccgttcgctggtccataaggcgcgtgaagcgctgggcgggctggacattctggcgctggtggccggtaaacagacggcaatcccggagataaaagatctgaccagcgagcaatttcagcaaaccttcgccgttaacgtttttgctctgttctggataacccaggaagcgattccgctgctgccaaaaggcgccagtattatcacaacgtcgtctatccaggcgtatcagcccagtccgcacctgctggattatgcggcaaccaaggcggcaatcctcaattacagccgtggcctggcgaaacaggtggcggaaaaaggaattcgtgtgaatattgtcgcgcctggccctatctggacagcgctgcaaatttccggcggtcaaacccaggataaaattccgcagtttggtcagcagacgccaatgaagcgggccggccaaccggcagagctggcgccggtgtatgtctatctggcaagccaggaatccagttacgttaccgcagaagtgcacggcgtgtgcggcggggagcatttaggctaacgcatgaagtcgattaaggtggcgcaattctgttaagcaaggcgccactttaggcaataaaaaagccgggtggcgacttcgccttacccggcctacagcgtcagcagaatacttatttcgctttcgcggtctcttcgccgaccagaccaatcttgagatagcccgcctgatgcagcatatccatcactttcatcagggtttcatactctacggttttatccgcgcggaagaaaatcgtagtatcctttttcccttccgtcagggccgttagctcggcaatcatcgtatcatccgtcaccggatcgttaccgataaacatggtgttatccgctttcaccgacagataaaccggtttttccggacgcggctgtggcgtactggtagaagcgggcagattcaccttgacgtccaccgtcgccagcggcgcagccaccataaagataatcagcagaaccaacatgacatcgataaacggcgtcacgttgatttcatgcatttcgccgttgtcatccaggttctcgttaagacgcattgccatgacgcattaccctacccgtaatttctgcgcggcgcgtaccggctgcgcactggcgctcgcattcagatcaagatcgcggctttgcagcagcaatacctgcgccgccacgtcgcccagcgtcgctttgtaactgcctatctgacgtgcgaagatgttgtaaatgacgaccgccgggatcgcggctaccagcccaatcgccgtcgccagcagcgcttccgcaataccaggagcgaccaccgccaggttggtggtctgcgtttgcgcaataccgatgaagctattcataatgccccatacggtgccaaacaacccgacgaagggggaaatggcgccgatcgtcgccagataaccgttgcctcgtcccatgtagcggcccaccgctgcgacgcgacgttccagacggaagccggtacgttctttaatcccttcgttatcttcgctgccctgagagagttccagttcattctgcgcttcattgatgagctgtgcgctgaggctttttgcgctgaaacctgccgcaatgtcggaagcctgatctaaagagcgcgcatcggctaattgcagttgttcgcgctttaagcggcgcttttgcgtgaaaaattcaacgcttttactgaagaagatagcccaggtgacgactgacgccagaatcaaaccaatcatcacgcacttcacgacaatatcggcgtgctgatacatgccccagacggaaagatccgtctgcatcaaattattacccactctgtatctccaggacgcaaatcacaaaatctgagcataataatatcaaaacaacgtcgaattgatagtcgttctcattactatttacatactgccgcacctttactgctttttctttgcgcttacgcattaaaaaagccacctgtttttattttggcaaaattttcatctgtatcacacgtcgccagggtgcagatggttatattcatgctagtttagacatccagacggttaaaatcaggaaacgcaacatgacggataaacagttggataccaaactggtaaacgcaggacgcagcaaaaaatacacgcttggctcagtgaatagtgtgattcaacgcgcttcttcactggtgtttgacaccgtcgaggccaaaaaacacgctacccgcaatctcgccaacggcgaattattttacggacgccggggaacgctgacccacttttcgctccaggaagccatgtgtgaactggaaggcggcgccggatgcgcgctcttcccgtgcggcgcggcggcggtcgccaacaccattctggcattcgttgagcagggcgaccacatcctgatgaccaacacagcttatgaacccagccaggatttctgcagcaaaattctcggcaaactgggcgtgacgacaagctggttcgacccgctcatcggcgctgatatcacgcaacatattcagccgaacacgaaagtcgtatttctggaatcccccggttctattaccatggaagtacatgatattccgagcattgttagtgcggtcagacgcgtcgcgccagaagccgtcatcatgattgataatacctgggcggctggcgttctgttcaaagctctggaattcgatattgatatctctatccaggcgggcactaagtatctgattggtcattctgatgcgatggtcgggactgccgttgcaaatgcgcgctgctgggaacaattgcgggaaaacgcctatctgatggggcaaatgctcgacgccgacacggcttatatgaccagccgcggtctgcgcacactcggtgtccgactgcgccagcatcaagaaagcagcctcaaaatcgccgcatggctggcgaaccatcctcaggtcgcgcgcgttaatcatccggccctgccgggtagcaaaggtcatgcgttctggaaacgagactttacaggtagcagcggcctgttctcctttgtgctcaataaaaagctgaccgaggcagaattatcagcctatctggataacttttcgctgttcagtatggcctactcctggggaggctacgaatcgctgattattgctaatcagccggaacagatcgccgcgattcgtcccgcaggcggcgtagattttaccggtacgctggttcgggtgcatattggtttagagagtgttgatgatttgatcgctgatttagccgccggcttcgccagaattgtgtaaagttgccggggatggacatatatgcagacaatttccgtggaaaagtctgcgtttgttgcgtccgggatcaaggcatcccggacgattcaggagtacaataggcgaataaaagcataaatgctgttccacaggaaagttcatggctgtcattcaagatattatcgctgcgctctggcaacatgattttgccgcgctggcgaatccacacgttgttagcgtcgtctactttgtcatgttcgccacgctatttttagaaaacggtctgctgccagcgtcattcttacctggcgatagtctgctgctactggcaggcgcgttgatcgcccaggatgtgatgcattttttgccgacgattggcattctcaccgccgcggccagtctcggctgctggctaagttatatccagggacgctggctcggtaatacgcgtaccgtcaaaggctggctggcgcagcttccggcaaaatatcatcagcgcgccacctgcatgtttgaccgtcacggtttgttagcattgcttgccgggcgctttctggcgtttgtccgcactctgctgccaacaatggcgggcatttccggcctgtccaaccgccggtttcagttttttaactggttaagcggcctgctgtgggtgactgtcgtgaccagcttcggctacgcgctcagtatgatcccgtttgttaagcgccatgaagaccaggtaatgacatttttaatgatccttcccgtcgcgctactggtcgccgggctgttaggtacgctggtcgtggtgattaaaaagaaatactgtaacgcctgacgtatccataatcggccaggatggcccggttacgcttcgttgacccgtggcgggatgccccacttagctcccttgcattgtccgcattcttgccacatcttcgcccggcgtaacgccaaaataacgtttaaactcccggctaaactgcgatgcgctctcatagccgacccgcatcgccgcggcgctggccttcataccgtcgtgaatcatcatcatccgcgctttatgcagtcggtagctttttaaatactgcaacggcgaggtgctggtgaccgccttaaaattatggtgaaacgccgacacgctcatgttcgcttctgccgccagttgctcaacattcaggttctcggtgtatttcatttcgatctgtttaagtacgcgactgatcaggctaaagtgcgtctggcgactaaccagcgcaagcagcgccccgccgcgcggccccatcagcacatgataaagaatttcgcgaataatctgttttcccagaatccgcgcatccagcgggcgctccatcacatccagcaatctttccaccgcacataaaatctcgtccgacagcgtggcggagttaatcccactggccgccatcggcaactggaaacgctcatcttcgccaatgtccatgagcaactcttgcagttgcagcacatcaatatcgagccgaataccggccagcggtacctccggcgtcgcccaggtctcgcattcaaaagggagcggcacggtcagtaagagatattcattagcgtcataacgaaacttgcgcttgttaatatagccaattttatggccggaaaagagaaatatgatgccaggctgatacatgaccggcgtgcgcggccccggttcaacaccatacaacagacgaatgcccgccagccgctcgctgattattttatcattattttttaaatgattaattttatccgccaactgtaagcaaattgcttcacgattcataacgcgccattttttcatcaaatccactccgctggattgtgcgcatttttagcgattttctccagcattctggagaaataggcaaaacattggcagaaatgtgcattgagagacatccctcacaagaccacaatgatgaccatcaggcagacagccgcctgccctctttttacccacataagggaatgagcaatgaacaatttcaaattacatacccctacccgcattctgtttggtaaaggcgctatcgtcgatcttcgcgatcaaatcccgcaggacgcccgcgtgctgattacctatggcggcggtagcgtgaaaaagaccggcgtactggcgcaagttcaggaagcgttaaaaggactggatgttcgggagtttggcggtattgaaccgaacccgtcctatgaaacgctgatgaaggccgtgcagcttgtgcgcgacgaaaatattaccttcctgctggccgttggcggcggttccgtactggacggcaccaaatttatcgccgcagcggcgcagtatacggacggcgtcgatccgtggcacattctggaaaccggcggtactgagattcgtagcgcaatcccgatggggtctgtgctgaccctaccggcaaccggctcagaatcgaacgccggcgcagtcatttcccgtaaaaccactggcgacaaacaggccttccactcctcgttcgtgcaaccggtgtttgccgtactggacccggtctacacctatacattgccgccgcgccaggttgcgaacggcgtcgtggatgctttcgtccataccgttgagcagtacgtcacttacccggttaacggcaaaattcaggatcgtttcgccgaaggtattttactcacactgatcgaagaaggtcccaaagcgctgcaagagcctgaaaactatgacgtccgcgctaacgtgatgtgggccgctactcaggcgttaaatggcctgattggcgctggggttccgcaggactgggcgacgcatatgctgggccacgagcttaccgcgatgcacggtctcgatcatgcccagacgctggctatcgttctgcctgcgctatggaacgaaaaacgagacgttaaacgtgcaaaactcctgcaatatgctgaacgtgtatggaatatcaccgacggttccgacgacgagcgtattgatgccgccattgccgccacccgccgtttcttcgaacagatgggcgtgcctacccacctgtccgattacggtctggatggcagcactattccggcgctactggctaaacttgaggcgcatggatgcataaatttaggtgaaaatcaggatattacgctggatgtcagccgtcggatttatgaagcggcgcgctaaggttttttcgcctctgactttcgtttttggccatttcgtccagacttaagtcacttagtctcgccggacccgactccggcgagccaattaaaagaggaacacatcatggctaatccaaccattatcaggctacaggatggcaacgtaatgccacaacttgggctgggagtctggaaagcaagcaatgaagaggtgatcgcggcgattcataaagcgctggaggtgggctatcgatcgattgataccgccacagcatatcagaatgaagaaggcgtcggcaaagcgctaaaagcagcgagcgtagcgcgggaagagctgtttatcaccaccaagttgtggaatgacgatcaaaaacgtccccgcgaagccctgcaggagagtctgaaaaaactgcagcttgattatctcgatctctatctgatgcactggcctgtaccggctatcgatcactatgtcgacgcctggaagggcatgatcgcgctgcaaaaagaggggctggtaaagagtatcggggtctgtaactttcagatccatcacctccagcgtctgatcgatgaaaccggcgttacccctgtgatcaaccagatcgagcttcaccccttgatgcaacagcgccagctacatgcgtggaatgcgacgcataaaatccagaccgagtcctggagcccgctggcgcagggtggcgaaggcgtattcgatcagaaagtgattcgcgaactggcggataaatacggcaaaacgcccgcccagattgttattcgctggcatctggactgcgggctggtcgtcattccgaaatccgtcaccccttcccgtatcgcggaaaactttgctgtctgggatttccgtctcgataaagatgaattaggcgagatcgcaaaactggatcaaggaaaacgcctcggtcccgatccggatcagttcggcggttaagccggatttatcgcacgccatgcccgacgatgtcgtcgggcttttttgcattccgaaacattaagaaacaattacgcgcatttaacagtatatttcccccacacacaagcgcagaattattctgattttgtgaataattattcatatttattatgaatttacttaatgcatataaaatatttatggatgtgtgattgtggcggaaaaaaaatctcagggcgtcaaatggctcccattcattcttattctggttatcgccgccggactgtggcagctaacgcccccttccgggttaagcgcgccggcctggcattccgcgattatttttgtcgcgacgatcgcctctatcgtggcgaaagtgctgcctattggcgcggtcggtattattggtatcaccgtctttgcgctcgcctatgctgccggcgacaaaacggccagcggcgcgattaccacggccttgagcgagctgaacagttcgctgatctggcttatcgtcgtcgcctttatgattgcccgtgggtttatcaaaaccgggctgggtcggcgtatcgccctacaaatgatccgtctgttaggtaaacgaacgctgggtctggcttatggtctggcgtttgccgatctgatcctctctcccgcgatgcccagtaacaccgcgcgctgcggcggcgtgatttacccgatcgccgactcgctggcgcgcagctttgattcacatccggaagatgagtctcgcagcaaaatcggcacctttctgatcacctgtattggcaatgttaacgacgtcactgccgcactgtttatgaccggttatacgggtaacctgctggcggtaaaactggcggcgaacgccggcgttacgttgagctggggaagctggtttatcgccgcgctcctgccttgcctggtctcttttcttatcgtcccgctgctggtctactggctgacccgtccggaaattaaacatacgccggatgcgccggatttggcgcgcaaagagctggcgcaaatgggcagtatgacgcgcggcgagtggctcatgctggcgaccgtcggcgtgttgctggtgctatggatttttggcagctcgctcggcgtggatgccacgacggcctcttttgtcggtctctctattttattactgagcggcgtgctcacctgggaagacgttaaaagcgaaaaaggcgcctgggatacgttgatttggtttgccgcgctgctgatgatggctaaccagttgaagaaactaggattcaccagctggtttggcaacctgattggcgacagcatcggcagcacgatgcatggaaccagttggataatcatcctgctgctgcttaacgcagcctatttttatacccactatttttttgccagcggcaacgcgcaaatcgccgcgctgtatgcggtatttctgggcgtcggtctgcatctgaatataccggcggcgccgatggcgctcatgctggcgtttaccagcagcctgtactgctctcttacgcagtatacccacgcacgcggccccattctttttggcgccggctatgtaccgacgggcgtctggtggcgaacgggatttattatcagtctctttaatcaggcggtctttttgacagtcggcctcgcatggtggaaagtgttagggttgtattaaacgcttaacgcatcgataagcccctcggttaacggagaaatggaatgacctgcattttctgtcaaatagttgaaggtaaagcaccttgtcataaagtttgggaagatgagcatcacctggcttttttgtcgatttttccgaataccgatgggtttaccgtagtgatcccgaaaaaacattaccccagctacgcgttcgatctaccgccgcaggcgttagcggacctgatgctggcgacccaaaaagtggcgaagaaactggataaggctttcccggatgtcagtcgtacgggaatgttcttcgaaggtttcggcgtagaccatgtgcacagtaaattaagccccatgcacggtactggcgatttaacccactggaaaccgattgaatcgcggcagaataaatttttcgaacagtatgaaggatatctgtcgtcacacgatcatgaacgggctgatgatgaaaaactggccgcgctggcggccagaattcgtgaggcataaatacggagcacttctgccggatggcggtgtaagcaccttatccggcctacaaaactgtgctattcatagacctgataagcgcagcgccgtcaggcattataccttagattatatacttcttatctattttaatatatcaaccctggtaggttaaatattacggcgcgtggctaaatatttcgtacaaaaaccatccaggaatagcggcaataacacccattaaaattatccctgcaagagtcatttgcctgtcttcacgtttttccatattacatgctttaatagccattatgaatataacaacagctattatagcaattacgataaaacagggaataataatcatacccatgatatcccctcctctggggctgtatacaagcatcatgccttaatcattaaggtaatatataattaatttatacaatcaataatatttaaataaaatataaagctccccgtaatttagcaattactaaagatcgacacaatatatttagatgtctgttacttccagaaacattagcttccagaagcaacagattcaaaggtaattaacgccctgcgcctttcccgcgcttcttattcgcagcaagcccctgccgctgatgttccaccggcgtatgcttggtcaacgccgggcgcgtgttgcggttctggcgacgcgcttcgcgcatctcttcaatggtcggcgcaggcaccagacactcacggcgaccgccaatcaaatgctttttccccatcgcttccagcgcctggcgaatcagcggccagttcgccggatcgtgataacgcagcagcgccttatgcaggcgacgctgcctgtctcccttcggcaccaccacatcttcactcttataaccaattttacccagcgggtttttgccggtgtaatacatggtggtcgaatttgccaacggcgacgggtagaagttctgcacctgatccagacggaagcggtggcgcttgagccacagcgccagattcaccatatcctcgtcccgcgtgcccggatgcgcggagataaaatatgggatcagatactgctcttttccggcctgtttagagtaaaggtcaaataactctttaaagcgatcgtagctgcccatacccggcttcatcattttcgacagcggaccttcttcagtatgctccggcgcaatcttcagatagccgcccacatgatggctcgccagctctttaatgtagcgaggatcttctacggcgatgtcgtagcgcacgccggaggcaattaagattttcttaatgcctttcagctcacgggcgcggcgataaagattgatcgtcggcgtatggtcagtatccatatgcggacagatatccggatagacgcatgacaggcgacgacaggtctgctccgcacgcggcgacttacagcgcagcatatacatgttcgcggtaggaccgcccagatcggagatcacgccggtaaaccccggcaccgtgtcgcggatcgcttcgatctcgttgatgatagagtcttctgaacggctctgaatgatgcgcccttcatgttcagtgatcgagcagaaagagcagccgccaaagcagccgcgcatgatattgatcgaaaagcggatcatctcataggccggaatacgggcattgccgtaagccgggtgcggcacacgctgatacggcagcgcaaacacgctatccatctcttcagtggagagcggtatggcgggcgggttgatccagacatagcggtcgccgtgtttttgcatcagcgcccgcgcgcagccagggttagtttcgtgatgcagaatacgcgacgcatgggcgtacagcaccttgtcgcctttcaccttttcaaaggatggcagcaggatataggttttttcccacggcttcggacgcggcggctgcacggtaatcgctttagcttcctgctttttcggcgcgaccggcttgttatccgcgcacggcagatcctcgccatagggatggggaattggatcgattttacccggcgtgtccagacgagtggagtcgacgccgctccagcctggcagcgcttctttaaccataatcgcagtgttacgcacatcacgaatctgatcgatggtttcgcccattgccagacgatgcgccacttccaccagcggacgctcgccgttgccaaacatcagcatgtcggctttggaatcgactaacactgaacgacgcacagtatcagaccagtagtcgtaatgcgcggtacggcgcagactggcctcaatgccgccaaggatcaccgggacatctttccacgcttctttgcaacgctgggtatagaccagcgtggcgcggtccgggcgtttgcccgcgacgttatccggggtgtaggcgtcatcgtggcgcagcttacggtcagcggtgtaacggttaatcatcgagtccatgttgccggcggtgacgccgaagaacaggttcggttttcccagacgcataaagtcgtctttgctgttccagtccggctgggcgatgatccccacgcggaagccctgcgcttccagcatacgaccgcaaatcgccatgccgaagctcggatggtcgacgtaggcgtcgccggttaccagaataatgtcgcagctatcccagccaagttgatccatctcgtcacgtgacatcggcaaaaacggcgccggcccaaagcaggcggcccagtactgcggccaggagaaaaggtcgcgatccggttggatcagggagatagcgctcataatgcttccaaaacgattggcaaaaaaataatcaaaggtcggggattataagccgtatctatagcgaaaatgaaggagattatcgccttatatgcaggactggcgcgaaatagaaacaactttcaacggcctggcctgaggtgtttgaaattggtcttatgaatatcttcaaattggtatgcaattaattatacccacgtctaaaaacgcagtatcgtcataacaacaaaaagtaaaaaaacatcacattatcagtaatatataaaaaaacttcgctgaattgctcacgacactgtttttaccatgactttcttctgtgaaccagatctctttctttggtctattgattaaattaaattggctgacagaattcaggggataaagaacaccatcaccacgcctttccccaacgcaacaccttacgtatcagcaggttattaattaatcaacgataaccacaggaatcccaacctataaggaagcagatatgaaaaacacacgttcattcacaacatcagcggtattactggccggctgtttgctactggcatttccagcgctcgccaaaaccacgctgaaactgagccacaatcaggataaaagccacgccgttcacaaagcgatgagctatctggccgacaaagcgaaagcctattcggacggcgaattaaatattcgtatttaccccaacgccacgctgggcaacgaacgtgaatcgctggaattgatgaactccggcgctctgcaaatggtgaaagtcaatgcggcatcgctggagtcttttgcgccggaatatagcgtgtttagcctgccgtttttattccgcgaccgcgatcactactacaacgtactgaaaagcgacttagggaaacgcattctcgcgtcctccgaaagcaaaggcttcgtcggcttaacctggtacgacggcggcgcccgcagtttttacgctggtaagcccatcactcaacccgacgatttagccggtatgaaaatcagagtgcagcaaagccccagcgctatcgcgatggtgaaagctctcggcggcgtgccgacgccgatggcgcaaggcgaactctataccgcgctccagcaaggcgtggtcgatggcggcgaaaacaaccccgtggtttatgccgatatgcgtcatgcggaggtggcgaaattctattcccgcgacgagcacacgatggtgccggatgtcctggtcatcagtaccaaagtacttaacaaattgagcgataaagagcggaaggcgttatataaagccgcagatgaatccatgcagcaaatgaaagatgtcatctggcccgccgcggaaaaagaggcttatgagagcatgaaggccatgaacgcgactgttgttgatattgataaatccgcgttcaaacagcgtgttaagcccttgtttgatgagttccgcgcaaaagacgctcagtcagcgaaggatctggaatacatcgagaatatgtaaatctgccgggcagggttctcctgccctttacaggatgtaatatgcgaatactcaccaatgcactgaacaaaatactggccgggtgctgctgtattattctggcggtcatggttgcctgcgtatcctggcaggtggcggcgcgctttatattcaacgcgccaagcagcacgctcgacgaattcacccagattctttttatgtggatgattctgctaggcggcgtctataccgccggattaaaaaaacatttagctatcgatttgttagcgcaaaaactctcccgaacgcccgccctcatgctcgacagtatcattcaggtgattattaccgtgttcgcgctgatttttatggtgtacggcggtgatattattgttgaaaaagcggcgcacgtcagccaaatgtccccggtattaaaatggcctatggataaagtctattgggtcatgccgattagcggcgtcatcctggtgtactacaccattgtgaacgttattgataattatcatcagcgccatcttcgctaacgagggatatatggactttgaatatatttacccaataattgttttatttggcagctttgccattatgctggcggtcggcgttcctattacattcgctatcgggctgtcgtccttattctcaatcctgatagcccttcccccggatgcggcaatctcggttatttcgcaaaaaatgaccgtcggtctcgatggctttacgctgctggcgatccccttttttgtgttagccggcaatatcatgaataccgggggaatcgcccggcgcctggtgaatctggctcaggcgttagttggccgccttcccggttcgctggcgcactgcaatattctggcgaacaccctgtttggcgcgatatccggctcggcggtcgcttctgcggccgcggtgggcggcatcatgtcgccattacaggaaaaagagggctactctccggcgttctctacggcgatcaacgtcgcttcggcgccgattggcctgatgatcccgcccagcaatgtgctaattgtctattcgctggctagcggcggcacctctgtcgccgccctgtttttggcgggctacctgcccggcatcttaaccgcgctggctttaatgacggtagcggcgctgtatgcccatcgccaccattacccggttgccgaacgcatcaacctgcggcagtttctgtcggtattccgcgattcgttgcccagcctgttgctgatatttattattatcggcggcattatcggcggcgtatttacgccaacagaggcctctgcgatcgcggtaatctatagcctggcgctggcggccatttatcgagaaattaatgtgagtaagttgcgcgatattctgctggattcggtagtaaccagctctattgttctcttactggtcggctgctcaatgggaatgtcatgggcgatgaccaatgctgatgttcctgaactgattaatgaaatgattaccagcgtgtccgaaaataaatgggtcatcttgctgattatcaatctcattttgttattcgtcgggacgtttatggatattaccccggctattctaatctttacgcctattttccttcccattgctcaacatctgggaatcgaccctgtccattttggcattattatggttttcaatttaaccatcggactgtgtacgcccccggtaggcactattttgttcgtcggttgcagtatcggcaaaatcagtattgataaagtcgtcaaaccgctattaccgatgtttctggcactctttgtggtcatggcgatgatttgctacttcccgcagttgagtctgctgcttcccacgctgtttgctccttcctgaaaaccctgacgggtctgcgctattcagacccgtactcggacgctttacgacgctggattcaccagcatttgcccaatcgagccgcggtcagccatttccagcgtctggctgttgaaatagaacgggaagtgcggccaggacggctgaccgtaatagaccagcagttcgacttgcccatccacccagacggtatctttccagcctctatcttccgggaacggcatagcgccgttgacgttacgaatcaggaaagagacgccctcaatatggaacgactgcggcatatcggcgcgtaccgtccagcgctcccaggtgccttgttgggcggtaatatcaatgcgattcacatcccacagttggccgttaatccccggatcgtcgccaagactgatgtcccgactgcggacaggcgcgccgctcatgatctccgtcggcaacagacgcatcggcagattatcggtcaccagcggcagcaatccggttggccgtaacgtcagcaccagggtcgaaaccagaatactggaaggctcaaagaaaccgcgaatccgatcgactatgctggccgcttccccgcaggtgatcgagacttcgtcgccgttggtcatatcaaccaggatttcacgtcgctcgccgggcgccagtgacaactgtttgacggaaaccggcgcaggtaaaaagccctgatcgcctgaaatcacatgcagcgcccggccatcgctcatctgaagctgatagcgccgcgagttcgaggcgttcaacaaccgtaaccgcacccagccgcgggacacttcgacataggggctttgcgcgccgttcaccagcagcgtatcgccgacaaaaccaccgcttcccggttcgctgtactccggcgtcccaaagttatccagccgtttatcctggataatgacgggaaaatcatccacgccgtaatggttcggaatgggcagcgttttactgatgtcgtcttcgaccagccacattcctgccaggccgttatacacctgctgcgcggtgcggttaggcgtgttagcgtgataccacagcgtcgcggcgctctgacgaatcggcaacaccggcgcccagtccgcgttcggcgacatcatacgcgccgggccacccatcagcggccccggcaccagtaaaccagcaaccgtcatggagacattttccgccaggcggttgctatagatgagtttaacgtcatcgcctttccagacgcggattgtcggccccagataacgaccgttcactccccagaccggcgcgcgcgtgccttgcgtaaaggaccagtgcgctcgctgtagcgtcataaacaacggctgcccgcgacgggactccagcaacggcggaacaggcaacggctgttgctgaccggcagcattcgccctgaggggaatcgcgcctgcacatagtgcgattcccgatgcctgaagaaactgacgccgactgaatgacatataagctccatgtaaaacaggctaaagagttgtgcctgaaaaaatgatttctacaataacagagtaaggctgcttaaaccttaccggtcgcttcacgttccgcaacctctttatcaagttccgcgattttttgctccattaacgcacggcagtgggccgccagctcgcgaacctgatctttaccatattcgctgacgtcgactggcggcagcatttccacaataaccagtccgttgttcaggcggtttagattgactttgttagaggtgttggaaacgcagacaggaatgatcggcacaccagccgcgatagccgcatgaaacgcgccggttttaaacggcagcagaccgcgtccccggctacgcgtaccttcagggaacatccagatagaaatacgacgctttttaaaatggttaaccactgccgcaatggtgctatgcgctttggcgcggttattacggtcaatcaacagattaccggtcagccagtacagttgcccaaaaaacgggatccaaagcaggctttttttccccaccgtcaccgttggcggctgcacaatattcgccgccgtgaccatatcataattattctgatggttagcaatatagatagcattgccatagttttccgcgtcggcgggtttgcggcactccactttcaggccaaacagcggggccagacggccgaacatatgtccaaacgtcgccacgtgttttgggttacgtgggctgaaaaggcagtaaatagaaccgaaaacacagaccagaatggagtaaataacggtaacaataagacgaaaaatatatagcataacaacctctgaaggcctaagagcccggcattctacgtcacctgaaattcaggttaggattttggtaagtgtggctctctggaaaaacgtattgttaatcgcaatgcacgaataaacaacggttttacgggaaattttaatgttaatccgatctgaaaccgtaggccggataagacgctactgcgtcgtcatccggcaacggcagagcgccggatggcggcttagatgccttgtccggcctacgggcgcccctgtcttactcttcgctgtcgccatgacttacgcgatgcggcgaatcaatctcaatgcgatcgatacgctgcaggccgcgcattaatgtgccacggcgtccgcgttcaccgaccaccttttgtaactcttcagggcgcagtttgattttgcgcttcccgacatggatagtcagagtgctttgtggcggcagcacgtacaggtgcgccagtccatcatcgcctttcgccgcttctgcagaggggatattaatgatcttattccctttgcctttcgacagctgcggcagagagtctaccgggaacatcaacatccgtccggcctgggtaatcgccagcagcatatcgtgctcgtcttcaatcaccagcggcggcatgacgtgcgcattttccggcagtgtaatcaatgtcttaccggcacggttacgggcaaccagatcgttaaacgtacaaacgaagccgtagcccgcatccgacgccatcagcagtttctggtcatcgccttccatcagcatatgctctacggtcgcccccggcggcagcgtgagtttgccggtcagcggctcgccctgcccacgcgccgacggaagcgtaatgggatcaatagcatagctgcgcccggtggtatcaataaacaccaccggttgattgctcttacctttcaccgcggctttaaagctgtcgcccgctttatagttaagccccggcgcatcaatatcatgacctttggcgctgcgcacccagcccatctgcgacagcacgatagtcaccggttcggacggcagcatatcgtgttcgctcatcgctttagcttcttcgcgctcacgcagcggagaacggcgatcgtcgccataggcatcggcgtccgcctgtagttcttttttcagcaaggtattcattttgcgttcggacgcgagaatgccctgcaactggtccctctctttttccagctcgtcctgctcgccgcgaattttcatctcttccagtttggcgagatggcgcagtttcagttcgagaatcgcttccgcctgggtttcgctgatgccgaaacgcgacatcagcgcgggttttggctcgtcttcgctacggataatctcaatcacttcgtcgatgttgagaaacgccaccagcaaaccttcgaggatatgcaggcgcttaagcactttctccagacgatagttcagacgacggcgcaccgtgtcgcggcggaacgccagccactcggtgaggatctccagcaggtttttcaccgccggacgaccatccagaccgatcatgttcaggttaatacggtagcttttttccagatcggtggtggcgaacagatggttcatcacctgttccatatccacacggttggagcgtggcacaatcactaaacgcgtcgggttttcgtgatccgattcatcgcgcagatcgtccaccatcggcagttttttattacgcatctgcgcagcaatctgctccagcactttcgcgccagagacctgatgcggcagcgcggaaattaccacagcgccgtcttctttggtccataccgcgcgcatacgcacggagccccgcccgttttcgtaaattttacgaatttccgcacgtggggtaatgatctccgcttcggtcgggtaatccggcccctgaacgatatccagcaactgatccagcgtcgttttcggctgctcaatcagcgtaatcgccgctttcgccacttcgcgcaggttgtgcggcgggatatctgttgccatgcccaccgcaataccggtggtgccgttcagcaggatgttcggcagacgcgccggtaacattttcggttcctgcatggtgccgtcgaagtttggcacccagtccgccgtcccctgaccgagttcgcttaacagcagctcggcgtatttggacaggcgggattcggtataacgcatcgccgcgaatgacttcggatcatccggcgcgccccagttcccctggccatcgaccagcgggtaacggtaagagaacggctgcgccatcagcaccatggcttcatagcaggcgctgtcgccatgcgggtgatacttacccagtacgtcaccaacggtacgggcggattttttaaatttagcggtggcgttcagccccagctctgacatcgcatagacgatgcggcgctgtaccggcttcaggccgtcgccaataaacggcaacgcacgatccatgatcacgtacatggagtagtttaagtaggcgttttccgtaaattcatgtagcgcaaggcgctctgccatatcgctcattaacaggggatcctcaatctgcatgctgaccgttcggacggcaatattgccgcagataataccctatctcacggtctgagtcacaaaccgtgagacaggtggcgaggaagttaacgaagcggcagatagatatccgtcagcagctcatgttccgcgacctcatggacgaaattcaggtactggaagaagaccggaaaatcgcgcggcgtctcaccgctggcgggtagccattcgcggaataaataccacacgctctccgggaggctgtcgagcgatccctgatggcgcaccaccgcgcagcgcccgccaggaatctcgctattcaccacgccaacgtcattttcggctatcggctggcggacgctgccgcagatatcaaagcggaattgagccggcggcgtcgtctgcgggtcgtgccaggcaataccaaaagtttgactgctggcaatcggcgactggcccgtttcgcgtcgccatgcaataaatttcgccgcgctggcgttgaccttatccggatgccccagatgcgtcagcatcgcgacgcgggtaggtggaaattcaacgatttttacgtccatgacatgctgctcctgtaacgcaagtttaggaacgcgctggtgccaggccagccagtccggcgattgccgaaaccggcgcgggctttgaccaaacgcggttttgaaagcacgtgtgaacgactccggattctgaaacccggcatccagcgcgatatcgataactttatcctgcgggttaaacgccagccgccatgacgcgcggcgcaaacgcaaccactggatatagcgatagagcggaagcccgctccaggtggtaaactgccggtgaaaatgaaacggcgagctgtgcgccatccggcttaacgcctcaatcgacagaggctcatccagatgacgctcaatgtggtcgcaaacgcgccgcagacgttcggaataagccgcgctgatcaggtcattcatcactgcctccttgtggcctattctgcccaccgggcggctgtgaatcctgaccgatcttgcgcaatgtgggattacggattcactttacgaatctgttttacgtcgatttcgacagagttccagtctttatccacttcgccctgaatttcaacggtatcctgcggggttacggtcaggccgttccagcgcttgtggtcaatgtccacattgatagtaccggtcgcatctttaaacacatacagatcgtcggaaatgcgctcgacgatattcccgcgcagcgttacccacgcatcgtcacgcagcgatttagcgctctctaccgtcgtgctgctgccgttcgggccgacaaatccgccgccttgcgtttgcgtcgccgacgggccggagaaaccgccctgctgagccgccagaaccggggtagaacacagtgccataacggcaacgattgcagctaattttttcatgattacttttccctttcatgtcgtttcagatccatttaataaggtaatccttaacaacttcttaaggcaaaaaaagaatctttttttctgtacatcgcctgcggcgacaaggttaactgacggcaacgcgagttaccgcaaggaagaacagatgcgaattttactggtagaagatgacacacttattggcgatggcataaaagcgggcctgagtaaaatgggtttcagcgtcgactggtttaccgagggacgtccgggcaaagaggcgctttacagcgcgccttatgatgcggttattttagatttgacgctgccaggcatggacggacgggatattttgcgcgaatggcgcgaaaagggtaaacaggaaccggtactgatcctgacggcgcgcgacgcgttagcagagcgcgtcgaggggctacgtctgggcgccgatgactatttatgtaaacctttcgcgctcattgaggtcgccgcccgtctggaggcgctggtacgccgcgccagcggtcaggccagtagcgaattgcgccacggccaggtgacgctcaatccaggcaatctcgtcgcgacgcttgccggcgaaccactggccctaaaaccaaaagagttcgcgttgctggaactcttactgcgcaacaaaggtcgcgtgctgccgcgcaagcttattgaagagaagctgtataactgggatgacgacgtgtccagcaatgcagtggaagtccatgttcatcatttacgccgcaagctcggcagcgaatttattcgcaccgtgcacggcatcggctacaccctgggtgacgcatgaaattgacgcaacgtctcagcctgcgcgtcaggctgacgcttattttcctgattctggtctccatcacctgggcaatctccagttttgtggcctggagaaagacgacggataatgtcgacgagctgtttgacacacagttgatgttgttcgccagacggcttagcaccctcgatcttaacgagatcaacgccccgcagcgcatggcgcatacgccaaagaaattaaaacatgggcatatcgatgacgatgcgctggcgttcgccatcttttccgctgacggcaaaatgttgctgcatgatggcgacaacggccaggatattccgtatcgctatcgccgggaaggtttcgacaatggctatctgaaggatgacaacgacctctggcgttttttgtggttgaactcggcggacggcaagtatcgtatcgtcgtcggtcaggagtgggattaccgcgaagatatggcgctggcgatcgtggcggcgcaattaacgccgtggctgatcgcccttcccttcatgctgctaattttattactcctgcttcaccgcgagctcagaccattgaaaaaactggcgcaggcgctacgcttccggtcgccggaatcggaaacgccgctcgacgccaaaggcgtaccgagcgaggttcgcccactggtcgaagcgcttaatcagctttttagccgcatccactccatgatggtgcgcgaacggcgatttacctccgacgccgcccatgaattgcgcagcccgctggccgcgctgaaagtacaaaccgaggtggcgcagctctcgggcgacgatccgctatcgcgtgataaagcgctgacccagctccatgcggggatcgatcgcgccacgcgactggtcgatcagctactgacgttatcgcgtctcgactcgctcaataatttgcaggatgtagcggagatttcgctggaagagctgctgcagtccgcggtaatggatatttatcatccggcgcagcaggcgaatatcgacgtgcgtttacagcttaacgcccatgacgtcatacgtaccggccagccgctactcttaagcctgttagtgcgtaacctgctggataatgcgattcgctacagtccgcagggcagcgtcgtcgacgttaccttacatgcccgcagcttcaccgtcagagataatggccccggcgtagcgccagagattctgacgcatatcggcgagcgtttttaccgcccgccaggccaaagtgtgaccggcagcggtctgggattatcaatcgtccgccgcatcgctacgctgcacggcatgacggtgtcgtttggcaacgccgcggaaggtggatttgaggccgtagtaagttggtaacagagacttttgccaaaaacgcaaaagactttgcacattttgctaatttcaccgcaccgcccgtcagcgtagaatcagcagcaaacgcatttcttgaggacacaaaatgagtaacatcctgattatcaacggggcgaaaaaattcgcgcactccaacggccagttgaatgacaccctgaccgaagttgccgatgggctgctgcgcgatctgggtcatcaggttaagatcgtccgcgccgacagcgactatgacattaaagaagaggtgcagaatttcgtctgggctgacgtggtgatttggcagatgccaggctggtggatgggcgcgccatggacagtaaaaaaatatatggatgatgtctttaccgaaggtcacggtacgctctatgccagcgatggccgcacgcgttccgatgccgctaaaaagtacggttccggcggtctggtgcaggggaaaaaatatatgctgtcactgacgtggaacgcgccgatggaagcatttaccgaaaaagatcagtttttccacggtgtaggcgtagatggcgtctatctgccattccataaagccaaccagttcctgggcatggacgcgctgccaacgtttattgccaacgacgtgattaaaatgccggatgttccgcgctataccgcagaatatcgcaagcatctgagcgaaatttttgcttaactggtcatcctggaattagaaggagttaaccatgcttaccgtcattgccgaaattcgcacgcgtccgggccaacatcaccgtcaggccgtcctcgaccagtttgcgaaaattattccaaccgttcttaaagaagaggggtgccacggttacgcgccgatggtggatcatgccgcgggcgtgagttttcagactctggcgcctgactcgatcgtgatgattgaacagtgggaaagcgttgcgcaccttgaggcacatctgcaaaccccgcatatgaaagcctacagcgacgcggtaaaagacgatgtgctggaaatgaatattcgtattctggaatccggcgtttaagttattaccctcgtctgacgtcgccctgatgcgatgcgcaagtgtcgccatcaggctgcggcgtcatgtcggattcgcttatccggcctgcggcatgcagaccagataaagcgtgcaacaaccgttacacgtcgagatccgcgagatcgcctttttcctgtagccagttgcgtcgatcttcagaacgtttcttcgccagcagcatatccatcatcgcattagtacgctgatcgtcttcatcgctaatggtgagctgcaccaggcggcgagtattcggatcaagcgtggtttcgcgtaactgcatcgggttcatttctcccaggcctttgaaacgctgtacgttcggcttgcctttcttacgcttcagttgttccagtacgcccgccttctcttcttccgtcagcgcgtaatagacctctttacccaaatcgatacggtatagcggcggtagcgcgacgtagacatgaccattcttcaccagcgcgcggaagtgtctgacaaacagcgcgcaaagcagagtagcgatatgcaaaccatcggagtccgcatccgccaggatacagatcttgccgtagcgcagctgactcagatcgtcgctgtccggatcgataccgatcgccacggaaatatcatgcacttcttgcgaggccagcacttcatcggaagagacctcccaggtgttaaggatcttacctttgagcggcatgatcgcctgatattcgcgatcgcgcgcctgcttggcggaaccgcccgccgaatccccttccacaaggaacagctcggtccgattaagatcctgcgcggtacagtccgccagtttccccggcaacgccgggccgctggtgagctttttgcgcaccactttttttgcggcgcgcagtcgccgctgcgcgctggcaatcgccatctctgccagttgttccgccgcctgcacgttctggttcagccacaggctgaaggcatctttcaccacgccggaaacaaatgccgcacattgacgcgacgacagacgctctttggtctgcccggcaaattgcgggtcctgcattttcacggaaagcacataagcgcagcgatcccagatatcttccgccgacagtttgacgccgcgcggcagaatattgcggtattcgcaaaattcgcgcatcgcgtcgagcaggccctggcgcagaccgttgacgtgcgtccccccctgcatggtcgggatcaggttgacgtagctttccgtcagtaattcgccgccttccggcagccacaatagcgcccagtcaaccgcttccgtttcaccgttaaaattaccgataaacggcttttccggcagcgtcggcaggccgtttaccgcttcgcccagatagtcgttcagaccatcctggtagcaccagcgctgctcgctgttattcacttcatctttaaaagtgatttccacgccgggacacagcaccgcttttgctttcagaacgtgcattaagcgagagacagaaaaacgcgggctgtcgaagaaactttcgtccggccagaaatggacgctggttccagtattacgtttaccgcaggtgccgacaacctgcaaatcctgcactttttcgccgttttcaaacgcgatgttatagacctgaccgtcgcggcgcacggtcacttccacgcgctttgacagggcatttactaccgaaatccccaccccatgcagaccaccagagaactgatagttcttattggagaatttaccgccggcatgaagccgacagaggatcagttctaccgccggaaccccctcttccggatggatatccaccggcatcccgcgtccgtcgtcaatcacttccagcgattgatcggcatgtaaaatgacatccacgcgtttggcgtgacctgccagtgcttcatccacactattatcaatcacttcctgacccaaatggttggggcgggtcgtatcggtgtacatccccgggcggcggcgtaccggctcaagcccagtgagtacctcaatggcatcagcgttataagtttgcgtcatggtttaattagcaattcgaattgattgtcagcaactgtgcagtccaagaaaatcgacaatctggttgaaataatcttcgaagcccgtgaatgcgtgattaccaccctcggtcactgtctgacggcaggaggcgtaatatgccaccgcctggcggtaatccagcacttcatcgcccgtctgttgcagtagccagatcaggtccggcgcttccagcgggtcaatctgcatgactttaagatcataaatatggcgagactctagcacatattgctgcccggtgtaggggttctcgttctgaccgagatagtcggtcagtaattcaaagggccgcacggcgggattcaccaccacagccggcagcataaaacattgcgacagccaggtggcgtaataaccacccagcgacgatcctaccagccctaatggcgcaccgccatgctcaagcacgagagattccagcaactccgccgcatcggcaggatacggcggcagctgagggacgatcatctcaacatgcggatgacgctccgccagccagttttttagctggcacgcttttgccgagcgaggggaactgttgaatccgtgcaaatagagaagcgtagacatcagtatccttccgaagcggtatcgggtcggaaccgggtatcctgcaggcgatgcacttccgtctccaggacgccgttcgcccggagctccagcgtacgccagcccggcgcgatagtatccagcgtaaagttcgcgcagtgcggtttgaactgtacgcaggttgacggcgacgccagcagacggcgaccgttccagtcaagatccagctcctggtgaatatgtccgcataacagatattttacacgcgggaaattcgccagcacgctatccagctcaccggcattacgcaagctgtgctgatccaaccaactgcaccctgccggcaacggatggtggtgcaacaggagcaatgtctgtctctctggcgcatcggcgagcttacgctcaagccattccagttggaactcgctcagttcgccatgcggaacgccaaacacctggctatccagcaacaaaatctgccattgttcaccgattaacacgcgtttagccggggaaatccccgcctcttgcagcgcgctgtacattgccggctgaaaatcatgattgcccggtagccaaacgcaaggcgcgcgaaagcttgcgataccctcagcaaaatgctgataagccgcagcggattgatcctgcgccagatcgccggtggccacgatcagatcatattcatactgttgcgcccgaatagcctccagcacggcctggtaactttcccaggtattgacgcctaacagcgtttcatgcttttcggcaaacaggtgagtatctgtaatttgtaaaatcctgactcgggcctcaccagccagaggtagggttaacaggctttccaaatggtgtccttaggtttcacgacgctaataaaccggaatcgccatcgctccatgtgctaaacagaatcgtagccagtcggccagaaactgattaatttgatgcttttcgtcgcgttgatgcaactttttatttggataatcataccgcgctttgaagcgaaagatctgctggcttgaacacacttcagccaccatcgcatcatggtagaggcgcaccgtcagcgacggcaggctccagtaggtgatggctggcgtcgtttgctcgatcgttacaagcgtagtgtatcgggtcgattccacaatcgttaaccgatattgtacgttgcccacctgatagctcaccgtttcaccgggggcgtcattgcgcggcagcaggcggcgcaattgcgaaaaattggtttcgcacaaacgcatcatttctgggaagtcaggtgtataacgcttcattttttccactcgttttttaactcttgatgatgcaactgaagccattgcaaagcgatgactgcggctgcgttgtcgattttcccctcttctacccactggtatgcctgttcccggcttaccacatgaacccgaatatcttcgttttcatccgccagaccatgaatacctaccgcggtcgtggcgtccacttcacccaccagaatagatgagcgctcgctggttcctcctggactcgccaggtaactgatgaccggtcgggtgcggcccacggtcagccctgcttcttccatcgcctcccgccgggcgaccgcctcaatggtttcgccttcttctatcatgccggcgaccatctccagcagccacggcgtaacgcttgtgtcatatgcggcaatacgaatctgttcgaccagcaccacctcgtcgcgttcagggtcaaagggtagcaagacggcggcgtgcccgcgctcaaaaatttcgcgctttacctcgccactcatttctccgttgaataaacgatggcggaatcgatacacatccaatgaaaaaaaaccgcgatagcgcgtttcccgtgcaataatttctacatcgcttttggtgaaagtaactggcaagttgtctgatttacgcattgtgctgccctgctagcaataatgattaaatgatgaatttcaagggtggttgactgctgttttatcacccttgtggtaaattggtgccaattaaggctcgtatggcacgtaacgccaactttttgcagtggcggattctgctagaatcagcaattatttttacaaattgatcagcgctaaatactgcttcacaacaaggaatgcaaatgaagaaattgctccccatccttatcggcctgagcctgtcggggttcagcacactaagccaggcagagaacctgatgcaagtttatcagcaagcacgcctgagcaacccggaattgcgtaaatccgctgccgatcgcgatgctgcattcgaaaaaattaacgaagcgcgtagtcctttactgccgcaactgggtttaggtgccgactacacctacagcaacggttatcgcgatgcgaacggtatcaactccaatgaaaccagcgcttctctgcaattaacgcagacgctatttgatatgtcgaaatggcgtgggctcaccctgcaagaaaaagcagcaggcattcaggatgtcacctatcagaccgatcagcagacgctgatcctcaataccgcgaacgcgtattttaaggtattgaacgctattgatgtgctttcctatacccaggcgcaaaaagaggctatctaccgtcagttagatcaaacgacgcaacgttttaacgtgggtctggtcgccattaccgacgtgcaaaacgcccgtgcgcaatatgataccgtactggcgaatgaagtgaccgcccgcaacaacctggataacgcggtagaagagctgcgccaggtaaccggcaattattacccggagctggcgtcgcttaacgtcgagcattttaaaaccgacaaacccaaagctgttaatgcgctgttgaaggaagcggaaaaccgtaacctgtcgctgttgcaggcgcgtttaagtcaggatctggcgcgcgagcaaatccgtcaggcgcaggatggtcacctgccgacgctgaatttaacggcctcaaccggcatttctgatacctcttatagcggttctaaaaccaactccacccagtacgacgatagcaacatggggcagaataaaatcggccttaacttctccctgccgctgtatcaaggtgggatggttaactcgcaggtaaaacaggcgcagtataacttcgtcggcgcaagcgaacagctggaaagcgcgcaccgtagcgtggtgcagaccgtacgttcttcctttaacaatattaacgcctccatcagcagcatcaacgcgtataaacaggcggtcgtttccgcgcaaagttctttggatgccatggaagccggttactcggtcggtacacgtaccattgttgacgtactggatgccaccaccactctgtatgatgccaagcagcaactggccaacgcgcgttatacctatttgattaatcagttaaatatcaaatatgcgctcggtacgctgaacgagcaggatctgctcgcgcttaacagtacgttgggtaaacctatcccgacgtcgccggaaagcgtagcgccggaaacgccagatcaggatgctgccgcagacggttataatgctcatagcgccgcgccagcagtacagccgaccgccgctcgcgccaacagcaataacggcaatccattccggcattgataagttattcgctggcgctgcgcttatcagacctgtgcccttgtaggtctggtaagcgcggcgctacctgtcataaagccgcgcctgaacgtaagacaacgtaaagatcctgctattccgccgcattctcgccttttctcgcttcaatttcgaccagtcatcctctattctgaaggcatgttgtatttaccactgggtcctggaagacaaatatgaaacggacaaaatccatccatcacgcatcatttcgcaaaagctggagcgcgcggcatttaacgccggtcgccctggcggttacggctgtttttatgctggctggctgtgaaaaaagcgatgaaaccgtatcgctgtatcaaaacgctgatgactgttcagcggcgaatccgggcaaaagcgcggagtgtacaaccgcgtataacaatgcgctgaaagaggccgaacgtactgcgcctaagtacgctacacgcgaagattgcgtcgctgagtttggcgaaggtcagtgccagcaagcgcctgcacaggctggcatggcgccggaaaatcaggcgcaggcccaacaatccagcggcagtttctggatgccgcttatggcaggttacatgatggggcgtctgatgggcggcggcgcaggctttgcgcaacagccgctgtttagctcgaaaaacccggccagccctgcatacggcaaatataccgatgcggcaggtaaaaactacggcgcggcgcaaccgggccggacaatgaccgtaccgaaaaccgcgatggcgccgaaacctgccaccacaacaaccgttacccgcggcggttttggcgaatccgtcgccaaacagagcaccatgcagcgtagcgctgccggtacttcaacacgttcgatgggcggctgatacgcatggaaagagtcagtattaccgagcgcccggactggcgcgataaagcgactgaatacgggtttaattttcacactatgtatggtgaaccgtactggtgtgaagacgcttattacaagttaacgctcgcccaggtggaaaaactggaagacgttaccgccgagttgcaccagatgtgcctcaaggtagtagaacgcgtcatcgccagcgatgagctgatgacgaagtttcgtattccaaaacatacctggggttttgttcgtcagtcctggcaaacgcaacaaccgtcgctctattcccgcctcgatctggcctgggacggcatcggcgagcctaagctgctcgaaaataatgccgacacgccaacgtcgctgtatgaagcggcgtttttccagtggatttggctggaagatcagatcaacgcgggcaatctgccggaaggcagcgatcagtttaatagcctgcaggaaaagctgattgaacgctttgctgaacttcgcgaacagtacggttttcagttgctgcatctcacctgctgtcgcgatacggttgaggatcgcggcaccattcagtatttacaggactgcgcggccgaagcggaaatcgccaccgaatttctctatatcgacgatattggtctgggggaaaaaggccaatttacggatctgcaggatcaggtcattgcgaacctgttcaagctctatccgtgggaatttatgctgcgcgagatgttttccaccaagctggaagatgccggcgtgcgctggctggaaccggcctggaaaagcattatctccaataaagcgttgttgccgctgttgtgggagatgttccctgaccatccgaatctgttgcctgcgtatttcgccgaagacgaacatccgccaatggataaatatgtcgtgaaaccgatcttctcccgcgaaggggcgaacgtatcgattattgagaacggtaaaacgatcgaatccgtggaaggcccgtatggcgaagagggtatgatcgtgcaacagttctatccgctgccaaaattcggcgacagttacaccctgattggtagctggctgattaacgatcagcccgccggaattggtatccgtgaagatcgggcgctgatcacccaggatctctcccgcttctatccgcatatttttgtcgaaggatagattctcctgtaagcccgatgcgcgtagcgccatcgggcaatcattcagcgccttatccggcctaccccacctgcaccgacaacatacttatactgcccatctcaataccgtcgaccgggatggtgataggttccttgccgtcccaggcgccaagtacatacagcaaaggcaaaaagtgctccggcgtcgggttcgataaggcgcccccttcatgttgcagataattcaccagcgggtgctgttctaccggcccctgccacgtcagattggctttcacaaagtcattaaatgacgccgcccagggatacggtatattgtcaccgtgccaacgcacagtccgcagattatgaactacattcccgctggccaccagcatcacgccttcgtcacgcagcgtcgccagcttacgacccacctcaaaatgccatgccgccggtttggtactatcaacactaagctgcaccatcgggatatccgcattcgggtacatcttgatcaatacgccccaggagccgtgatcaaatccccacgcttctttatcgagcgcgacgggaacgggagccaacagttcaaccagacgctgcgccagcgcaggcgatccaggggccggataatgcgtgtcatacagcgcctgcggaaaaccgccaaaatcatggagagtttgcggcctttccatcgctgtgacgccagtcccacgggtataccagtgcgccgacaccaccactatcgcctgtggtcgcggtagggcttcccccaatcgccgccaggcgcgggtataatcgttatcgtccagcacgttcatcgggctgccatgccccaaaaacaatgctggcatacacgttaaagacatgatgttatccttactggaaagacattttgttaacatcaccatacgctttcttcacagaggaagaactcagataaccatgatgaagatcatcagttattttgaaggtcaggttcggacggcaaattgataaggagtaatggatgtcagtaccacttattctgaccttactggcgggcgccgccacctttattggcgcgtttcttggcgttctcggccaaaaaccgtctaaccgcgtgctggctttttcgctgggcttcgccgcagggatcatgctgcttatctcgctgatggagatgctgcccgccgcgcttgataccgaggggatgtcgcctgtactgggctacggaatgtttattatcggcctgttgggctacttcgggctggaccgcctgcttcctcacgctcatccgcaggatctggtgcaaaaaaggcagcagccgcttcccggctcgataaaacgcactgcgattttattgacgctcggcattagcctgcacaactttccggaagggatcgccacctttgtcactgccagcagcaatcttgaactgggtttcggcatcgcactggcggtggcgttgcacaatattcctgaaggtctggcggttgccggcccggtttatgccgcgacgggctcaaaacgtaccgcgattttttgggccggtatctccggcatggcggaaattcttggcggcgtgctggcgtggctgattttgggcagcctggtttcaccgatcgttatggcggctatcatggcggcagtcgccggcattatggtggcgctctccgtcgatgaactgatgccgctggcaaaagagatcgatcctaacaataaccccagctatggcgtgctttgcggtatgtccatcatggggctcagtctcgtcattttgcagacgataggtatcggttaagagaaacgtcgcgccggatgcaggcctttagccaggcaacatccggctgcccgtcaaggatatgcgctatttctgctcattcatcacgctgtcgccttcgctcgtctggcgaaaacgtttcgttcgcgcttcaagtaatgcatctctgtcttgccgaaacgctctgcaataacgcttcatatggcaaatataccctactaccaccagaacgattaatattatccaataccaggcaataaacatcctttttacccttaaaatttaacatcactaaacatttaacgttaaaattttacatacccttattttgacgtattcatatactggcatatttgtggaacaaataaatgattttgatcatataaatcagtggtgaaacacaataatgaaagaggtattaagcagaaaacaatgtcgataagatcacacttcgtactaatttatattgttcttaaaatatcacactcctactatcgactcactcaggcaattaaaaaatattgatacagaatatactttaaaataagtaacagcatcatgacttatatttaaagaccaatcatttacctcatttattattcataaaaacatagtatattcagaagtattatatttagaagttgtatataaggagatatatccatgtttgaccaataccggaaaacaatacttgccggtgccgtcgcactgacatgcggactcaccgcagccagtacgtttgccgcaggttttcaaccggcacagcccgcaggaaaattaggcgcagtcgttgtcgatccttacggaaatgcccctctcaccgcgctggtggaattagatagccatattatttcagacgttaaagttactgtacatggcaaaggggaaaaaggcgttcctgttacttataccgttgggaaagagtctttagaaacctatgacggtattcctatttttggcctttatcagaaatttgccaacaacgtcacggtagaatataaagaaaacggcaaagccatgaaggatgactatgtggtgcagacgtccgccatcgtcaaccattatatggataaccgttctatttcagatctccagcaaacgaaagttattaaagttgcgccaggatttgaagatcgcctttatctggtaaatacccatacctttacgccgcagggcgctgaatttcactggcacggcgaaaaagataaaaatgcgggcattcttgatgccggcccggcgggcggggctttgcctttcgatatcgccccttatacgtttgtggtcgacacccagggtgaatatcgctggtggctggatcaagataccttctacgacggccacgatatgaatatcaacaaacgcggctacctgatgggtattcgtgaaacgcctcgcggcacctttaccgcggtgcagggccaacactggtacgagtttgacatgatggggcaaattcttgccgatcataaactgccgcgcgggttcctggatgcgtctcatgaatccatcgaaaccgtgaacggcaccgtactgctgcgcgtcggcaaacgagattaccgcaaagaagacggcatacatgttcatactattcgtgaccaaatcattgaggtcgataagtctggccgcgtagtagacgtttgggatttaaccaaaatcctcgaccctatgcgtgatgcgctgctcggcgcgctggatgcgggcgcagtatgcgtgaacgtcgatctggcccatgccggacagcaggcgaaacttgaaccggatacgccgtatggcgatgcgcttggcgttggtgccggtcgtaactgggcgcacgtcaactctatcgcttatgacgcgaaagacgactccatcatcctttcttcccgccatcagggtattgtaaaaattggtcgcgataagcaggtgaaatggatactggcaccgtctaaaggctggaataagcagctagccagtaaattgctgaaaccggtagacgatcatggtaagccgttgacctgtgacgaaaacggcaagtgtaaggacaccgatttcgatttcacctatacccaacatacggcatggctttccagcaaaggcacgttaacggtctttgataacggcgatggtcgcggcctggagcaaccggctctaccgaccatgaaatattcccgttttgtcgaatataagatcgatgagaagaaaggcaccgtacaacaagtttgggaatacggtaaagaacgtggatatgatttctatagtcctattacctcggttgttgaatatcaaaaagaccgcgacaccatgttcggctttggcggttctattaacctgttcgacgttggtaaacccacagtcggcaaactgaatgagattgactataaaacgaaagaagtgaaagttgaaattgatgtgctgtcggataaacccaaccagactcactatcgtgcattactggttcatccaacgcaaatgtttaaataaataacgggaaggaattaatatgtcatctaaatggattacctctttatttaaaagcgtagtattaaccgcagcattggtcactccttttgcggcatcggcttttaccgagggcacagattatatggttctggagaaaccgattcctaatgcggataaaacgctgattaaggtatttagctacgcctgccctttctgctacaaatatgacaaagccgtaacaggtccggtttctgataaagtagccgatctcgttacgttcactccgttccacctggaaacaaaaggcgaatatggcaaacaggccagcgaagtatttgcagtcctgatcgccaaagataaagctgccgggatttcgttatttgatgctaaatcacaattcaaaaaagcgaagttcgcctggtatgcggcttaccatgataagaaagagcgctggtcagatgggaaagatccggcggcatttattaaaaccgggctggacgccgcaggcatgagccaggctgattttgaagcggcgctgaaagatcctgccgttcaggagacgctggaaaaatggaaagccgcctatgacgttgccaaaattcagggtgttccggcttacgtcgtcaacggcaagtaccttatctataccaaaaacatcaaatccatcgattctatggctgaactcgttcgggaactggccactaaaaaataagcagggaaacgattatggattttattaagggattatggcgagacctacgcgcaagaccagtggatacgctggtgagatggcaggaacagcgctttctgtggctgttaatggccatcgcgatgggaggattaattatcctggcgcactcgttcttccaaatctacctctacatggcaccgtgcgagcagtgtgtttacatccgttacgcgatgtttgtgatggtaattggcggggtgattgcggcgataaatcccaaaaatatcgtgctgaagctgattggctgcatcgcggcgttttatggcagcattatgggcattaagttttctattaagcttaatggtatccatcatgcggtacataatgcggaccccgattcactttttggcgtgcaaggatgttcgactgacccgacctttcctttcaacttaccgttggcggaatgggcaccggagtggtttaaacctaccggagactgcggttatgacgcgcctatcgtccctgatggcgtaacgctcagtagcgtacagcagtggtttgtcgatctctaccagcagtccgaaggctggtatctgcttccgccctggcactttatgaacatggcgcaggcatgtatgttggcctttgggttgtgcctgattctgctgctggtgatgagcggcgcctgggcattgaaactggccagaggcaaataacctgaatagataaaccaaagcagaggtctgcattcaggcctctgcttttctcacaataattttaccattcagcttattcgtcgttctttgaaactgaacgatatggcaccgaaggaatacaaaaaagccgatgacatctcatcggcttttttcaaccatgatccgttcgatcagctggctttgcgctcatgcgcctggcggtaagccaccagatcttcaatcgtgactaccgccatattatgctggcctgcaaacgcgatacactccggcgcgcgcgccatcgtcccatcgtcgttagtcaactcgcacagtacacctgcaggtttaaaaccggccagcgtcatcagatcgatggtcgcctccgtatgaccgccgcgcgtcagcacgccgcccgcctgagcgcgcagtgggaaaacgtgccccggacggttaagatcggacggttttgcgccatccttaattgccgcacgcaccgtagtgacacggtcagcggcggaaacgccggtggtcacgccttctgcggcttcaatggtcacggtaaaaccggtgccgtaggcgctggtgttgttttccaccatcattggcaagtcgagctgcttacgacggtcttcagtaatacacaggcaaacaataccgctaccgtgacgaatggttaacgccatctgttctacggtcatcgtctctgcggggaaaatcatatcgccttcgttttcacgatcttcatcatcaagcaccatcacaccgcgtccttcacgcagcgcatccagtgcaagttcaacacgttcaaaaggcgtaccaaaagaggaaagtagcgtctgattcatggtaaaaaaacctcattaatattatggttaccagaatcagggcagtcttaggagtgccgacaagcggcaaaaaaataacgtgagcgggtccatgcccgactggatcgttaccctctcccatccggactttaaccgtcggccccggaattacaccggatctgctgaccttttcgctatggcaaaaagcgctcgcgggctttcaacctgctctccgcgttccgtcacggcgcgccgtgatgagaaatgcgttaaacatcgctgatttaccgccggtggggaatttcgccccgccctgagaataagcgggttaactataacgctattgattaccttcatcaacgcctttactccgtatgacgtcacacaattctggtttatggcgtccacatatcgcactacaataagagctaacacttaccagttcagggaaaccacaatgattgacccgaaaaaaattgagcaaatcgcacgccaggttcatgagtcaatgccgaaaggtattcgcgagttcggggaagatatcgagaaaaaaatccgtcaaacgctgcaatctcagctgacgcgtctcgatctggtgagccgcgaagagtttgatgtccagactcaggtcttgctgcgcacccgggaaaaactggcgctgctggagcaacgcctcagcgaactggaagctcgcgacaagcctgaagaagtaaaacctgcgcccgccattccgccagtcgatccacaacaagagtaaaaacgtgaacgggcctgacggcccgctcatataagatctgaataatgccctgcacctgtaaagggagcctgcattagtgttctaattctaaccttttcgcctgagtcgcctgctggcagtaaagcgcgtaacgcttgcaaaaccagtcgcgatgctcctcgtccatattgccggttaccgcctggatatcaacaggacgcccctccgcctgcattctggcaaaactgcgcgccagaaaatcgaaattatttaatgaatagacgttattgttgttcatcagcataccctccagttattgaattctgttaaggctatatgctttttctgatttcagtatttccctatatgtacggcggttttatacataacgtgcgcaaatttaatgcgcaaaatcacaatattcaccaaagataacgacggataaatcgcttttcggacttaaggagatatgggtcacatgatattgtaacgcaatgaaataacaagcatgaaaattatcacgcgaacatccttctgaaggcggcgacaaggatagaaaatatgaccttatttgcggagtataacagcccctatctgtttgccatcgcgttcgttttctttatcggcgtgctggagatgatttcgctgatttttggccactttctttcaggcgcgctcgacgcccatctcgatcattatgacgccctgtcatccggccctgcgggccaggcgcttcattatctgaatattggacgcgttcccgccctggtcgtcctctgtctattggccggttatttcggcctcttcggtatcctcatccagcatggcgggatcatgctctggcaagcgccgctcagcaatctgctgctggtcccgttgagcattgtcctgtcggtctttgccgtgcattacagcggaaaaatcctcgcgccctggctacccagagatgaaagctccgccctccgggaagaggaatttatcggcggcatggcgattattaccggccacgccgccgtcgccggtacaccttgcgaaggaaaatttaccgataagttcggccagattcactatttactgctggaacccgaaaagggaaaagaatttaaaaaaggagacaaggtgctgattgtctgccgactttccgcaacgcgttatttggctgagcgtaccttctatgtttaattgagaggaacttacataatggatgatgtttttggcatattgccatcatggatgtttaccgccatcgttgcggttatcgtcttactaattatcgggatcatttttgctcgcctctatcgccgcgcatctgcggaacaggcatttgtccgtaccgggcttggcgggcaaaaagtggtgatgagcggcggcgctattgtgatgccaatctttcacgaaattattccgatcaatatgaataccctaaaacttgaagtcagccgtgctaccgtcgacagcctgatcaccaaagatcgtatgcgcgttgacgtggtcgtcgctttcttcgtacgtgtaaaaccctctgttgaaggtattgccaccgccgcacaaacgcttggccagcgaacgctgtcgccggaagatctgcgtatgctggttgaggataaattcgttgacgccttacgcgctaccgcggcccagatgacgatgcatgagctacaggatacgcgtgaaaacttcgttcagggcgtacaaaacaccgttgcggaagatttgtcgaaaaacggcctggagctggaaagtgtctcattaaccaactttaaccaaacgtccaaagagcatttcaatccaaacaatgcctttgatgccgaaggtctgacgaaactgacgcaggaaaccgaacgccgccgtcgtgaacgtaatgaagtggaacaggatgtggaagtggcggtgcgcgaaaagaaccgcgacgcgcttgagcgcaagctggaaatcgagcaacaagaagcctttatgactctggagcaggagcaacaggttaaaacccgcaccgccgaacaaaacgctaaaattgccgcttttgaggccgagcgccatcgtgaagcagaacagacgcgcattcttgctgagcggcagatccaggagacggagatcgaacgtgagcaagcagtacggtccaggaaagttgaggccgagcgtgaagtacgtattaaagagatcgaacagcaacaggtgacagaaatcgccaaccagacgaaatctatcgccattgccgccaaatccgagcagcaatcgcaagcggaagcgcgcgccaacgacgcgctggccgatgcggttcgcgcccagcaaaacgtagaaaccacccgccagaccgccgaagcggatcgcgccaagcaggtcgctctgatcgccgcggcgcaggatgcggaaaccaaagcggtcgaactgaccgttcgggcaaaagcagagaaagaagcggcagaattgcaagccgccgctatcatcgaactggcggaagcaacgcgtaaaaaaggtctggcggaagccgaagcgcaacgggcgctgaatgacgctatcaacgtactatctgacgaacaaaccagcctcaaatttaaactagcgctcttacaatcgttgcctgctgttattgagaagtctgttgaaccgatgaaatccatcgacggcattaagattattcaggtcgatggcctcaatcgcggcgcgacggcgggcgacgtcgccgctggcggcgctaacgggggaaacctggcggaacaagcgttatctgccgcgctcacctatcgtacccaggcaccgctgatcgattcgctgttaaacgagattggcatcgctggcggctcgctaaaggcgctgaccacgccgttggtttcatcggcaacggatgagattaatcgcgaagcaacgataaaagagcaataaccccccgccatatctcctgtccctggtcataagaccggggatttttttatcttttttccaccttgtctgtacaaagcgttatgaccagcaggccattttgcgtgggcgatccagtaacgcaaaatcggcgggagaaagcccttgcgccagacaggccactcaccaacaatcgcgatgtcagcaaggggctgaaacgggaaagcccctcccgaggaaggggctttaataaggaaagggttatgatgcaccaggtcatcatactgattgttctgttactgataagtttcgcagcttactaacagacaatcagagggggggagagatcccctctcacccttattcctttactttaggtcgaaaaaaaagcagcgtcaaccgcgagatacgcgtcgaaacaaaatgtccgacgcgccttcaaaatcagcgcccgccgcgtctgtaacgcctgatgacgcggttttacttctcgctctcggtctggatctttttgatgatattggtcgtggaacaaccatcttcgaagttcagcaccatgacttcaccgccgttggcccagacctcttcgctgcccgcgatctcttccggcttatagtcgccgccttttaccagcagatccggcagaataccggcaatcagtcgttgcggcgtatcctcttcaaaagagacaacccagtcgaccgactccagcgcgcctagcacgatcatacgctgttcgagcggattaaccggacggctttcgcccttcaggcgtttagtcgaggcgtcactattgaccgcaacaatcaggcggtcgcccagtttgcgcgcgttcgccagataagagacatggcccgcgtgcagaatatcgaaaacgccgttggtcatgaccactttctcgccacgcttacgcgcgctggcgacggcctgtctcaactcctcttcggtcataacgccgaagccggtatccgcgcgtccgcgcactgcgttttccagctcaataggggaaaccgttgacgtcccgagtttacctaccactacgcccgccgccgcattggcgaaataacacgcctcttccagggtatttcccgccgccagcgtcgccgccagcacgccgatcaccgtatcgcccgcaccggtaacatcataaacttcctgcgcctgcgtcggcatatgtagcggcgctttattcggttgcagcagcgtcattccctgttcggaacgcgtgaccaacagcgcggaaaggtcgtaatcagcaatgagtttcatgccgcgttcaaccagttcgtcttcgcttttacatttccccgcgaccgcctcaaattcagaaaggtttggcgtcagcagcgtggcgccgcggtaacgttcaaaatccgttcctttcggatcgatgagcaccggcacgcccgcctggcgcgccagggaaatcatagtctgcacgctggtcagagcgcctttggcataatcggacaataccagcgcgccgatcgatcccagcgcctggttgatacgctcatgcaacggctgcgggtccacgccctcaaagccttcttcaaaatcaagacgaatgagctgctgattacgtgatagtacgcgcagtttggtaatcgtcggatgcgtcggcacagaaacgaagtcgcacttcacattgacctccgccagcgttttgctcagcgcgcgcgcggcgtcatcaatacccgtcaggccgaccagacgggcgttcgctcccagagacgcaatgttcatcgccacgttcgccgcgccgcccgggcgttcctcaacggtatttaccttaaccacgggcaccggcgcttccggtgaaatacggcaagtggggccataccaatagcgatccagcattacatcacccacaaccatgacgcctgcacgttcaaacgctggcagatttactttcattcctgtctcctgagagattcaaaatttgcgcgcgataatagcataattcaaacggctaccagccacttccgccagcttgcctgcaccagcgcgcgctctttgctaaaacacgtctgcgccacatgaccgggaagctcctgcaacgccaggtggtgcagttcatcacgcagtgtggtgtaggctaccgtcagcgcctgcgcctcgtgttcatccataatgccgttttgcgccagaagctccaggatgcgcacgttatcagaccagcgcgttaatttaggtttttcatgagcgtagcgcagtaccagatattgcgcgataaactcaatatccgtaataccgccttcatcagctttaatatcaaaacgatcacgatgcttattgccgagatgcgcccgcattttctcgcgcatttcacgcacttcagtctgcaatgtcttgccgtcgcgcgccgtcgtcatgatagtgcggcgcaccgcatcaaactgtgaggtaagctgcgggtcgccatataccacgcgagcgcgtaccaatgcctgatgttcccaggtccaggcttcatgctgctgataatcggcaaacgcgtccgctgaagtcaccagcattcccgccgcgccagaggggcgtagacgcgcatccacctcatacaaaatgccggaggaagtgcgcgtactgaacagatgcataatgcgctgcgccaggcgcagataaaactgccgcccgtcgatttcgcgttcgccgttggtcatgacgtccatcggacagtcatgcaggaagatgagatccagatcggaactgtagcccagctcccatccgcccaacttgccataaccgacaaccgcaaacccccgcccctggcgctcgtccagatgcgctggctgaccataacgcgcaaccatttgcgtccacgcctgctgcaccacagcatcaatcatcgcctccgccagccatgtgaggtgatcgcttactttcatcaccggcagcgtaccggcaatatccgccgccgcaatccgcaaaagctgtgcctgtttaaactggcgtaatgcctccagttgttgttcttcgtcctcttccggcacgcgcagcaaatattggcgtaattcgtcgcggtaagcgtcggtagccgtcggctgataaagcgtgccggggtcgagcagttcatcaagcaacaacggataacgcgccaattggctcgctatcattggcgaagcggcgcagagcataatcaggtgtttcagcgcgccgggaaattcgctcagcagctccagataggtggtgcgagtgacaatccccgccagcaacggcgttatccgcgatagcgtaacagcggcgtcttcgcgagaacagacatcagcaagcaggtgcggcatcagttggtccagcacttgccgcccgcgcgggccgatagggcgtttatccagttccttacggaagtcagcgatgagggtcagaacctgtcgccgctcctcatcggctaaatgcgccagcactggcgtcgaatcatcctcctgtagcgcatcctgccatacttcacgccacggctctgaacgttcttcctcctgcggggtatcggcttcatcatcgccaattaattcgttgaatacgcggcgtacattagccatatgatccgtcagttcaccaacaagctgcggccagttctccgccttcattccccaggccagccgcgcccgattcagatcgtcggcaggcaacgtttgcgtctgttcgtcattgatgctttgcagcagattctccagacgacgtagaaaaagataggccacgcgcagttgcgccacgtcattctcaggcagcaaatgcagcgcagcgatagcatccagcgtcggcagtaacgaacgcgactgtagcgacggctcgcgtccgccgcggatgagctggaatacctgcacgataaactcaatttcacgaataccgcccgcgccaagtttaatgttgtctttcaaaccgcggcgtcgcacttcgcgggcgatcatccctttcatattacgtagcgactggatgacgctgaaatcgatatagcggcggaaaacgaaaggccgcagcatggcgcgtaattcacgagaccaggcgtcgtcgttatcgcccattagccgcgctttcaccatggcgtagcgttcccagtcgcgtccttgctcctgatagtaatcctccagcgcggcaaaactcagtaccagcgggccgctgtcgccaaacggtcgcaggcgcatgtccacccgatagacaaaaccgtccattgtgggctgatccagcgctttgatcagccgctgcccgagacgcgtaaaaaactgggcgttatcgagttcacgacgcccgccccgggtctcgccatgttccggccaggcgaaaatcagatcgatatcagacgaaaaattcagttcgccgccgcccagcttgcccatgcctaaaatcaacagcggctgcggaacgccctgcgggttacagggggttccccattcgcggcaacaggcggcatacagccagtcgcgcgcccccacaatgagcgtctccgccagatggctcaactgttgtaaaatagtctcatcgtccaccagcgacagcgtctgtgcccaggcgatgcgtaccatgatgcgacgacgaaaaaacctcagttcacgcatcagcgaggcgtcgtcacagacacctgccaacgcctcctgtaaccagccagcataatgtcgccattcatcagcctgcggcgatgcggattccagttcggcaagccactccggatgcgctatcacgctatccagcgcaaaatcgctaaatgtaagtactgacttcgcctgcacgctaagcgatgtctcagtaaatccttctggtaggcgctcaacaacggtctgccagtactgcgataagggtgaagagagcggcgtcatttaggggatatcctttaaataatgccgggtggcggcgtttcgcctgatccggcctacaagtccgcataccgtaagcctgataagcgcagcgtcatcaggcgctttctacggttctgattatcgttttccgctgtgcaaccagaacggctgctggttgatggcctcattacggaaatgttcaatttcaatacgttgcccggtaataatggcgtgacgcaatccctgccagttctccagccatgcctgcgcgaccatcgcatcataatacccggccagcagtaaaacgctgtcaatatcgcgagtcaaacgcggcaactggtcgcgatatttatcacccagcggttgtccaaaaactttttttaattcagcagcatgacgagaaagatgaatgtcggcgaaacgcttaaaagaatcggccattttggcctgcgccttcgcgtccagaaatggctgccaggctttcgtcaccagccattccgtcaatgccagtttcgccatcgccgtttgcgtactataaacggctgtgacggcggacaccgcggatgtcatcgtcgcttccgcctgggtaagtagatcacgtaagtgagcgctcgctttacgcggaacaatgccaccaaagagcattaaggcatggcgcaccaaccccatagcatccagcacgtgttctttcgccgacttgtcgccacgcagccagagctcttcatggtactgccactgtgacaacgccagatccagcgaggcctccagcccttgctctaccgtggctttcgcggcggtccgcagaattgtcgttggtgtattctctcgcggcgcattcccctgcgccaggtgataacctcgcgccgccttactcagactgccctgacgcaaaccggtttgcgacagcagttgcttcgccagttttaacacggcgcgcgtatcgccgcgaagcaactcaagctccagctcacaaatcggttcggcaaactcgcccgcttttacgtcgccgagatcgagcgcaatttcaatcctgctgccgtcaacgtccagacaccatttttcccggtaaaaatcggtactgaacagcggctgtacgcttgatgccaggccggcgggcaggttgccatccggccagacctccgccggaagttgcgtcagatccagcacgggttcgcttagcgcgacattgtattcgggtcgctggtgcagccccccgttacccggccggcaattttcatggtcatttcatagcgcccattttcaccacgaatacgcagccccatatcatggcggcgtagccagttatcaggcgtttcgaagtagatattcagcaactggctgggcgcatgatgctcgccgccgagcgtatgaagatgatttcgcagcgcatctacggcgtcgtgattgacgataaactttaattcgatttcctgagccatggccttgtacttatgggttatgtcacatctgggaagattcttggcgaacttacccgcattatttttgtcagtagatagtattttgcgccaaattgccatgcaacgagcaatttgacgggcgtaaaagtttgacgtagcggcaaaggcgacacagatgattccgattgatgtcgactactttgcgtagcgacactgatgccgttactatcgttccactttctctgacaataacgacagcctgatgccaaaattacgcctgattggactaactttacttgcgcttagcgccaccgccgtctctcatgctgaagagacgcgttacgtttctgatgaactgaatacctgggtccgcagcggtccgggagataattatcgccttgtgggtaccgtcaacgccggcgaggaagtcacgctcttacagagcgatgccaactatggtcaaatcaaagacagttctggtcgtactgcctggataccgttaaaagaactgaataccacgccaagcctgcgtacccgcgtgccggatctggaaaatcaggtcaaaacgttgactgataaactcaacaatattgataccacgtggaatcagcgcaccgccgatatgcagcagaaagtggcgcaaagcgacagcgtcatcaacgggctaaaagaagagaaccagaagctgaaaaacgagctgattgtcgcgcagaaaaaagttagcgccgcgaatctgcaactggatgacaaacagcgcaccattattatgcagtggtttatgtatggcggcggcgtattgggtattggcttgctgttagggctggtgctgccgcatatgatcccaagccgtaaacgcaaagaccgctggatgaactaaatcgccttctctgcggcactgtcttatcattagaggatgatcgtttttaaaaggaaagtggcgtgaagatttatctggtcggtggtgcggttcgggatgcgttgttagggctaccggttaaagataaagattgggtcgttgtcggcgccacgccgcaggagatgcttgatgcgggctaccagcaggtaggccgtgattttcctgtgtttctccatccgcaaactcacgaagaatacgcgctggcgcgtactgagcgtaaatccggttccggctacacgggcttcacctgttatgccgcgccggacgttaccctggaagccgatctccagcgtcgcgatctgaccattaatgctctggcgcgcgacgatgccggccagattatcgacccttaccacgggcgccgggatctggaggcacgtctactgcgccatgtctctcccgcgtttggcgaagatcccttgcgcgtattgcgcgtggcgcgttttgctgcccgttacgctcatcttagtttccgtatcgccgatgaaacactggcgctaatgcgcgaaatgaccgcggcaggcgagctggaacatctgacgccggaacgggtatggaaagagacggaaaatgcgcttaccacccgcaatccgcaggtttacttccaggtattgcgcgactgcggcgccctgcgcgtcctgtttccggaaatcgacgccctgtttggcgtacccgcgccggcaaagtggcatccggaaattgataccggagttcatacgttgatgacgctgtcgatggccgccatgctcagtccgcagcttgatgtccgtttcgccacgctttgtcatgatctgggcaaaggcttaacgccgaaaaacctctggccgcgccatcatggccacggcccggcgggcgtgaaactggtcgaacagttatgccagcgtttgcgcgtccccaatgacctgcgtgatttagctaaactggtcgccgaataccatgatctgatccacacctttccgatactccagccgaaaacgatcgttaagctgtttgacgccattgatgcatggcgtaaaccgcagcgcgtcgagcagattgcgctgaccagcgaagccgatgtccgtggacgtaccggatttgaagcgtcggattacccgcaggggcgctggctgcgcgaagcctggcaggtggcccaagcggtaccgacgaaagaggtggtggaggccggatttaagggcattgagattcgcgaggagctgacgaagcgacgaattgcagcggtcgccaactggaaagagaagcgctgcccgaaccccgccagctaaacgccatccggcacgataaattgcctgatggcgctgcgcttatcagaccgacaaaacagttaggccggacaaggcggtactccgccatccggcacggtcaatcatcagaagaagacaacgtaaacggcagccgccaccacaaagcggtaaatcgcaaacggaataaacgagatacgcttaatcagttgcaggaaggtcttgatagcgatcagcgccaccacaaacgccgtcacaaagcccaccgcgaacattggaatatccgctgcggtcaggaatgaccaacttttgtagagatccagaaccgttgcgcccatcatcatcggcacagccagtaagaacgagaactcagaggcggcgtaacggctgacgcccatcagcatcccaccggaaatggtcgctccggaacgcgagaagcccggccacagcgccagacactggaaacagccaatcataaacgcctgacgatacgtcatatcatccagccccggcgcgcgcggttctttcggcttcaggcactcggcggcaatcagcaacagaccgcctaccaccagcgcgtacatcacgttaattgggttaaatagcgacttgatcgtgtcatgaaagactaaccccagcaccaccgccggaatcatgcccagcaggatgtgaatcaacgttaatcgacctttactttcaccttcacgctgtagcgggcggccaaagtgaataccgatgagaccaaacaaccgccgccagaacatcaccacgaccgccagaatagatccaagttgaatcaccacttcgaatgtcttggccgtatcgccttcaaaccccagcagatgacccacaataatcatatggcccgtgctggataccggcaaaaactccgtcaatccttcgaccacacccaaaattgccgctatcagcagcgagtgcatatcgctcatcaataaacccctaaaatgaaaaacactgcaaaaatggatctcgcgttaagaccccatatataaccgtttggtttaaaaaatataaaattatttatttttatttcagattattgccacgctcaataattacccctacgttcgccgcgcgcgcgacggcgccaggcttactcagtttgatgcgaacccacggagaattgaatcggctaagcagcagatccgccacctcttccgccacacgctcgaccagagcaaaacgcccgccttcaacatgatttatcaccgtgtcggcgatatccgcgtaacttagacaatctgcgacatcatcgcttttcgccgacttgcggttatcccatgccatttcgatatcgaacaccagtttttgctcgatagtctgttcccagtcgtaaacaccgatagtggtgattaccgaaagttgctctataaatacaatatccatcacgacctgcctgctttttggctaacccggataccacttccggcgaaatgtgcgtattatccacagaaatagtaaataaaacgacactttcaatacggaacagcttatgagtgcaatcgcgcctggaatgatcctcttcgcgtacctctgcggctcaatttccagtgccattctggtttgccgcatcgccgggctgcccgatccgcgagaaagcggctccggcaacccgggcgcgacgaacgtattacgaatcggtggcaagggagcggctgtcgcggtacttatttttgacatccttaaaggtatgttgcccgtctggggcgcgtatgcgttaggcgttacccctttctggctggggcttatcgctatcgccgcctgtctggggcatatctggccggtcttttttggctttaaaggtgggaaaggcgtagcaaccgcgtttggcgccatcgcgcccatcggctgggatttaaccggcgtcatggcaggcacctggctgctgacggtcctgttaagcggttattcatcgttaggggcgattgtcagcgccttgattgcgccgttttacgtctggtggtttaaaccgcagttcaccttcccggtatcgatgctgtcatgtctcattttgctgcgccatcatgacaacatccagcgtctgtggcgtcgccaggagacgaaaatctggacgaagctgaaaaagaaacgccagaaagattgagctggagctgcgtctggaagagggccgcaaccgtctggggatcggcccacaagggttgaccggcaatagctcggttgatgggcttacatatcgaatccgccgcgcgtcacccttccaccattggcgtggttaggcgcgattttcggcctgatcttcctggtgctgctgatcgtctccaggctgttgtggatgcccgtcgttttgctgtaaacccgttggggcggcatgatgtcgccccctttctccgcttttacgccgccggcagctcggccagcggccagcgcggacgtaccgttacgccaagatccgccgtaacgcccgccttaaaccgcaccattccggcataggcgatcatcgccccgttgtcggtacaaaactccggacgcgcatagaacacttcgccgcggcgtttttgcatcatttcggcaagcttcgcgcgcagcgtgcggttagcgctgacgccgcccgccatgaccagacgcttaaaaccggtgctttccagcgcgcgcttgcacttgatcatcagcgtatccacgaccgcatcttcaaaagcgcgcgcgatatcagcgcgagtttgttcgtcgccgccattactacgaatggtgttagcggcaaaggttttcagaccggaaaaactaaaatccagccccggacgatcggtcatcgggcgcggaaagacaaaacgccccgccgtcccctgcgacgccattttcgacagcatcgggccgccaggataatccagccccaacaatttggcggttttatcaaacgcttcaccggcggcatcgtcaatcgactctcccagcagttcgtactgaccgattccggtcacgctaatgagctgcgtatgtccgccggagaccagtagcgccacaaacgggaattccgggggattatcttccagcattggcgccagcagatgaccttccatatggtgtacaggaatggccggcacattccaggcaaatgccagtgaacgcccgacggttgcgccgaccagcagcgcgccgaccaggcccgggcctgcggtataggccaccgcgtcgatatcgctcgccgtcagaccggcttcttttaatgccgcctgaatcagcggcacggttttacgcacatgatcgcgggaagccagttcaggcactacgccgccgtagtcagcatgtaatttcacctgactatacaattggttggctaacagaccctttttgtcgtcgtaaatagcgatgccggtttcatcgcaggatgtttcaatacccagtacacgcatgacttgttttacctcgctctaataccgcgcagtgtaggtcgaatgcgggtggatgtataccctcagtcccgacttcgtgtatactccctccccttataaaagtccctttcaaaaaaggccgcggtgctttacaaagcagcagcaattgcagtaaaattccgcaccattttgaaataagctggcgttgatgccagcggcaaaccgaattaatcaaaggtgagaggcacatgccggtaattaaagtacgtgaaaacgagccgttcgacgtagctctgcgtcgcttcaagcgttcctgcgaaaaagcaggtgttctggcggaagttcgtcgtcgtgagttctatgaaaaaccgacgaccgaacgtaagcgcgctaaagcttctgcagtgaaacgtcacgcgaagaaactggctcgcgaaaacgcacgccgtactcgtctgtactaatcttttgagagcgggctgctctcaattcagatcgagttgtagttgtaaggccgtgcttccgaaaggaatgcgcggcttgttttcgtttatgcattagcatatacacaaaatcattcatgctgcgtccaggcggcaagagagtaaatccccggcgcttacgcaagtcagcgacaggggtgagcaaacgtagccaacactacggcagcctgaagaatgacgtgtataaaaggggcatatggctggacgaatcccacgcgtattcattaatgacctgctggcgagaaccgatatcgtcgatctgatcgacgtgcgcgtaaaactcaagaaacagggcaagaactatcacgcgtgttgtccattccataatgagaaaaccccttctttcaccgtaaacggtgaaaaacagttttatcactgctttggatgcggcgcgcatggcaatgcgatcgactttttgatgaattacgacaagctcgaatttgtcgaaaccgtcgaagaattagcggccatgcataacctggaaattccctatgaagcaggcaccgggcttagccagatagagcgccatcaacggcaaaacctctatcagttgatgaatggtctgaatgacttttatcagcagtcgcttacccatcctgcggcaaaacctgcgcgtgactatctgcaaaagcgcggtctgagcgctgaaattattcagcgtttcgccattggcttcgcgccgccagggtgggataacgcgttaaagcgcttcggtaataacagcgataacaaggcattgttgctggatgccgggatgctggtcaataacgagcagggcagcacttacgatcgtttccgtaatcgggtcatgttccctattcgggacaaacgcggcagggtgattggttttggcggtcgagtactggggaacgacacgccgaaataccttaactctccggaaacggacattttccataaaggccgccagctatatggtctttatgaggctcagcaatatagtgctgaaccgcaacgcttgcttgtggtcgaaggttatatggatgtcgtcgcactagcgcaatacgacattaactatgcggtcgcttcgctgggtacctcaaccacggcagaccatatgcatatgttattccgggcgacgaacaacgtaatttgctgttacgacggcgaccgggctggccgtgatgccgcctggagagcgctggaaacagcaatgccttatatgaccgacggtcggcaggtacgctttatgtttttacctgacggcgaagacccggatacgctggtgcgtaaagaaggcaaggcggcttttgaagcgcggatggagcaggcgcagccgctctctacgtttctgtttaatagcctcctgccgcaggtggatttaagctcgccggatggcagcacgcagttagccgcactggcgctgccgctcattaatcaggtgcctggcgacgcacaccgtattcagttgcgccagacgttggggctgaagttaggcattttcgatgatagtcagcttgatcgtttagtgccaaaacaggcggaaagcggcgtttcccgcccggctccgcagctaaaacgcacgaccatgcgtatactgataggattactggtgcaaaacccggatctcgcgccgttagtgccgcccttagacgcgctggatcagaataagctgcctggacttggcttatttaaagaattggtcaaaacttgtttggctcagccaggtcttactaccggacaacttctggaactctaccgtggcacaaatgatgctgcgacccttgaaaaattatcgatgtgggacgatatagcagataaggcgattgccgaaaagacctttaccgactcactcaaccatatgtttgattcgctgctgcaactgcgacaagaagagctgatcgctcgcgatcgcactcacggtttaagcagcgaagaacgccgagagctctggacgttaaaccaggagctggccagaaaatgaatttaacggcttaaatgccgcatatcgatcgggaagcccccgacagccgcagtgagaggcagcggccaaaatataagtatgccctcgctttaaatgtcgacagctataccgtcgacaccaatcaaacgaataagtgtggataccgtcttatggagcaaaacccgcagtcacagctgaaacttcttgtcacccgtggtaaggagcaaggctatctgacctatgctgaggtcaatgaccatctgccggaagatatcgtcgattcagatcaaattgaagatatcatccaaatgatcaacgacatgggtattcaggtaatggaagaagcgcctgatgccgatgatctgctgctggctgaaaataccaccagcaccgatgaagatgcggaagaagctgctgcacaagttctgtccagtgttgagtctgaaatcggtcgtacgactgacccggtacgcatgtatatgcgtgaaatgggcactgttgaactgttgacccgggaaggcgaaatcgacatcgctaaacgtatcgaagacgggatcaaccaggttcaatgctccgttgccgaatacccggaagccattacctatctgctggaacagtacgatcgcgttgaggctgaagaggctcgtttgtccgatcttatcaccggctttgtcgatccgaacgcggaagaagagatggcgccgaccgcaactcacgtcggttctgaactctcccaggaagacctggatgatgacgaagacgaagatgaagaagacggcgacgatgacgccgccgatgacgacaacagcattgaccctgaactggcacgcgaaaaattcgctgagctgcgcgcgcaatacgtcgttacgcgcgacaccatcaaagcgaaaggccgcagccatgctgccgcgcaggaagagattctgaagctgtctgaagtgttcaaacagttccgtctggtaccgaagcaattcgactatctggtcaacagtatgcgcgtgatgatggatcgcgtgcgtacccaggaacgtctgatcatgaagctctgcgtcgagcagtgcaaaatgccgaagaagaactttatcacgctgtttaccggtaatgaaaccagcgaaacctggttcaatgccgctatcgcgatgaacaaaccgtggtcggaaaaactgcacgatgtcgcggaagaagtgcaacgctgcctgcaaaaactgcggcagattgaagaagagaccggtctgaccatcgaacaggtgaaagacatcaaccgtcgcatgtccatcggggaagcgaaagcccgccgtgcgaagaaagagatggttgaagcgaacttgcgtctggttatttctatcgctaagaaatacaccaaccgtggcttgcaattccttgatctgattcaggaaggcaacatcggtctgatgaaagcggtagataagttcgaataccgtcgcggctacaaattctccacctatgcaacctggtggatccgtcaggcgatcacccgttctatcgccgatcaggcgcgcaccatccgtattccggtgcatatgattgagaccatcaacaagctcaaccgtatttctcgccagatgctgcaagagatgggccgcgagccaacgccggaagagctggctgaacggatgctgatgccggaagataaaattcgtaaggtgctaaagattgccaaagagccaatctccatggaaacgccgatcggcgacgatgaagattcgcatctgggtgatttcatcgaggataccaccctcgagctgccgctggactctgccactaccgagagcctgcgtgccgccactcacgacgttttggctggcctgaccgctcgtgaagcgaaagtgctgcgtatgcgtttcggtatcgatatgaacaccgaccacacgctggaagaagtgggtaaacagttcgatgttacccgcgaacgtatccgtcagatcgaagcgaaggcgctgcgtaaactgcgccacccgagccgttctgaagtgctgcgcagcttcctcgacgattaattcgccgcacacgtataaacgccgccgcaaggcggcgtttttttatcaggccatgcgcaagcgccctatttggcctgcagaatttctacacagcgcgagtattcgcgccctcattccccattgctatagcccacgcataatgagcgcttgatccagttcgcgataggcctcgaccagtttttccgttttaattcggtttaagccgctgggattcggcaacacccacaccatcgtcgcgccaatggcgatcttttgtttaccccaggcgataccgcgctggctgaacccctgttcaaaagcctgtttaccaagcaccgccagcgccgcgggctggtagtcctctattttttcaatcaggtttcgtccgccgctacgtaattcatgcaacttcacctcagtcgcttgtaccgtcggtcggtcgacgagtttcgttaccccgcagcgaaaatccagtaatttttccgcctcttccggtttcaactgtcgatcggtgaaaccggccaaatgaataactttccaaaaacgattcgcgggatgcgcaaacggaaagccggtattcgccgaggagagtcccggattgatgccgcaaaaaaccacccgtagccctggcgccagtatgtccttaaccattattactcctgagcaatacaacgttctttaagtataacgggttgaaaacacattgtttataaaaacagcacccgcacggttacggctggattacagcgtaaagttacattataatccaccgccacggccccttagctcagtggttagagcaggcgactcataatcgcttggtcgctggttcaagtccagcaggggccaccaaattttagctttaaaatcatataattaagccactctaaagagtggcctttttgtttctgacagggctcaccccataccgctatttacgatgccaataggctgccgcacgtaccaggtgtggatcaaaccccttttcaaagcactgacttaaacgttttaccgttttgccttcgccagtaatccagatgaaatagtctgattctggtattgtcagctgcgacaggcgcgtttgcattgcctgttcatcgccgccaacaacatattccacagtaatatccgtcaaatgggcgagataatcgcggtatgccgcatcctgaatgctcaccagcgcggttaccgcagggcgcacaggcagacggctaagcgattccagacgacgacgtagcgcaggcataccggactcatcgcagacataaacctgacaggcatactcttccggcaccaccagcgaaccgcgcggcccgccgatcgtcagtgtatcgccttcacgggcttccattgcccaacggctggctacgccgccatcgtggataaagaaatccagcgccagctcgcgacgcgcctcgtcatacagcggcgtgtaatccctggagaccgggcgaacgccctccccccagataatgccttcctcagtgactgtcggaggcgtaaagcgacagcctggctcagggaaaaaaactttcgtgtgatcgtcaaagcccagggagatgaaaccgtccagcgcctcgccgccaagtacgatccgctgaaatcctgcgctaatacgttctacccgcagaacgatcagctcgcgaaaacgcagctcattacgaacacgctgtgggtagcgtacggatgatgtcgtcattttttgccttcgtgaagtaatacgatatatctaaattaaagttttaaatgataatgattgttaatcagtaaaaatgcaactgttttttgatagtgttctggcaacacatcgctaatcacaacttcaaaataaaacgttataaattaatagattatatcaacaatcgcttttatccttgctaaaaaccatcatttagatataaattagatatatctaaataagcaggaggcaatgatgcaaaatcaacatgaagggtgttgcaaaaaccgggatcatatgcacgatggttgctgcaaagatcgagaacatcagcatgaaggctgccatagcgcgcatcagcatgagaacgccagttgcggcggcgagcaccgtcacggacacggctgtggtcgtcatggacagggcggtggtcgacgtcagcgattttttggccacggggaacttcggctggtcattcttgatatcctgacccgggacgccagccacggctatgaactgattaaagcgatagaaaacctgacggggggcggctatacgccaagcgctggtgtgatctaccctacgctggattttttacaggatcagcaatttatcacgattagcgacgaagaaggcgggcggaaaaaaatcgcgattaccgcgaacggcgcgcaatggcttgatgaaaatcgcgaacacctgacgcatattcaggcgcggctaaaagcccgttgtgtgggcatggagttacgtaaaaatccgcagatgaagcgggcgctggataacttcaaggccgtgctggatctgcggataaaccacagcgatatcaacgacgcgcaaatcaaacgcattatcggcgtgattgatcgcgcggcgctggaaatcgccgaactggattaagcgggctgcgtgtcctcttcgcggacgcggaacacgttaaccagctcttttaaatgtaacgcctgttcgttcagcgacgccgcggcggcaacagactcttccacaaggcaggagttttgttgcgtggcggcgtcaatcaggccaatcgcgctgttaatctgcgaaataccgtcagtttgctcacggctggcctgcccaatctcgcgtaatatcacatccatctcttcgacgttatccaccatgccattaatcagggcgctggctttctccaccaggtgcatcccttcctgagtctgactggttgaatcttcaatcaaattacggatttcactggctgacgaggcgctcttttgcgccaactggcgaacctctccggcgacaacggcaaaaccacgtccatgttcgcccgcacgcgccgcttcaaccgccgcgttcagcgccagaatattggtctgaaaggcaatggaatcaatgatattgatgatatccgacatacgatttgccgtatcgttaatgacgcgcattttctgcgtcacttgattcatcatctccccattgtttttcactacgctggcggcgccggcagagagtttggtcgcttcactggtatggtcagctgtgtttttaaccgtggcggtaatctgttccatcgacgccgccgtttcttcaaccgagctggcctgttcttccgtacgcgcggccaaatcctggttaccggcgacaatttgcgccgccgccgtggagatactctccgaaccgttttgcacttcctgtacgatatccagcagacgcgttttcatcgccattaatgcttgcagtagtacgcctgtttcatctttatagtcggtggtgatatggcgagtcagatcgccatcggcaatcgcctcggcaaagcgtaccgcttcatcaagcggtcgggtaatggaacgtacgatataccatcccattacgcatccggcagcgatgcttatcagcgccagggtaattaacagcgtccggttagttttaaaatctccttcgacctgcacgcccgcgttgtgcatctgcgcatcctgaacggcgataagttcctgaactttgtccttatagaccttttgcacttgcaccgttctggtcatcatctcctgaatggccgcctgacgattatggctttgaatatcttgcaaaatacggaatctggactccaggtattgctggcgcgcttcacggatctcggtaatgattttctgcgaagccgcatcgtgacgattgctggaaagctcatccagtaacgccgtaatacgctggcttatttcatccagctctttctgcgaactctggctccagcgcccctcttcatccagtaacatgagctgctgcgcgatgatgaaatcattaaaattatcgattaacagattggctttcaccgtggtgggataatcattggtaataatgttctgcatacccgtattagcccgatcaaggctaaacaaagacagagcggaactcaccaccatgagaacaatgaataagccaaaggccataaataattttgaacgtattttaatgttatgcaaaaacatattttctccctgggattgcatatcctcatacaggaagatttatcggcaataatgttactaactttatgatattgatcgctttttatttcggaacattattagtaagtaatatttattgttcacagaaagatgaaccaaaagtgacataaattggcactaataatgaaagaaatacgctaaaaggttaaccatttcttatttattaactgagtttatacctattaataggtagacaagggagaaggaataaatatcacattatttttaacatcacaggccactgatactctctatgatggcaggcaccgccttctatcagagcgcatccgcccggtaagcctgttgctaccgggcggatgtcattaccattgctacctacaaataaacttaatgcagtaccgtgaccgcatcctccagccggctggcacggtgttttaccattgcggagacttgtgcgctctcttccaccagcgccgcatttttctgggttatgcggttcaactcgtccacggcgcgggtcaggctggaaagcccatctgtctgttcctgcgtcgactgactgatacgtgcgataagcagggtgacattttgcacctgagctacaatgtcatccatggtacggcctgcggcgtgaacctgctcggagcctgactgcacctttgttgcgctggcatcaattaatttacgaatatcgttcgccgcattagcgctgcggctggcaagatggcgtacctcgccagcaaccacggcaaaccctttcccctgctcgcccgctctcgccgcttctaccgccgcattcagcgccaggatattcgtctgaaaagcgatatcgttaattagcgtggtgatcgtcccgatacgttgcgtactgtgagcgatatcatccatcgttttaatcaccgtatccatcgcctcacctccctgagtcgccgcgctactggccgccatggaaagcttatccgcagcggaagccgtctcggaattgagcttcacggactccgccatctggttcatggtcgttaccgtttcctgaacattctccacggtctgacgggtgtgttcgttcagatcattattacccttcgccagcctttcactgccgtttctgacgctggaaacctgacttgatacgtcattgatcagccagcggcacatcaagccaagctgccccacggccctcagcgtcagccccaactcatcgctacgattaagatgttgtacgctgttgcgttcgccggtcgccactttcagcgcctgcgtcgccacattttcaatgggacgcacaatttgccattccaatagcgccgtacctgccagcatcgccaacgcgcccaacagcaacgcctgccatgaggcatccgtaccgaacaacgccaacgccagcattacggccattagccccataatgctacgcactcgccagcgaacaggcatagcgggcagtttgcccagcaaaccctgacgaaccaccaggcctttatgaattcgtttactacaccgcccttcatttagcgcctgatataaaggctcgacggcggcaacctcatcatccgtggcgcgggtacggatcgacatatatccagtcacacgcccttcacgtatcatcggtaccgcgttggcccgcacccaataatggtcgccgtttttacgccggtttttcacaatgccgctccacggttcgccctgttttagggtgtaccacatatctgcgaaggcagctttcggcatatccggatgacgcaccagattatgtggctgcgccagtaactcgtttaactgatagccgctcacttggacaaaagtgtcattggcgtgagtgatatagctttccaggtcggtcgtagacatcagagtggtatcatcatccagcggggtatttagctggctgacgtagggatgagaagacatgatagcgtcctgtgcaggttatctggatgttaatttttcgctcagatgttatttcggcgctaatctatttatctttagttgttaaaattgctctggatcgcaatttgcgattaatccttaatatttgtacgattttcacctcatcctgcgccttattttcattatgaaattgtttagcgtggacaacctttttctttaaaatctgccctggctcacctttttctcacgccgccgctaacgcaacacaccgtaaaccgtaaaacaagatctgctcaaaatgcatccaattgttaacgcatgatattaaatgttgggtaaatgtgattattcctggtgtttatcccgattttcactatgggcttagacccccgctaatccctgcaatacttaattcagtatcatgtgatacacggccctctggagctcattttgaacaggttaccttccagcgcatcggctttggcctgtagcgcgcacgcactgaatctcatcgagaagcgaacgctaaaccatgaggaaatgaaagcactaaaccgagaggtcattgactactttaaagagcatgtaaatccaggatttctggaataccggaaatctgttaccgccggcggggattacggagccgtagagtggcaagcgggcagtttgaatacgcttgtcgacacccaggggcaggagtttatcgactgtcttggggggtttggcatctttaacgtggggcaccgtaatcctgttgtggtatccgccgtccagaatcaactcgcaaaacaacctctccacagccaggagttacttgatcccttgcgggcgatgctggcaaaaacgctggcggcgctgacaccggggaaactcaagtacagctttttctgtaacagcggcaccgaatccgtcgaagcggcgctaaaactggcaaaagcgtatcagtcgccgcgcggcaagtttacctttatcgccaccagcggcgcatttcatggcaaatcattgggcgcgctctccgccacggccaaatccaccttccgcagaccctttatgcctttactgccgggcttccgccatgtgccgtttggcaatatcgacgcgatgagcatggcatttagcgaaggcaaaaaaacgggcgacgagatagcagccgtgattctggagcctattcagggtgaaggcggcgtgatcctgccgccgcagggatacctgacagaggtacgtaagctctgtgatgaattcggcgctctgatgattctggatgaagtacaaaccggcatggggcgtaccggcaagatgtttgcctgcgagcacgaaaatgtgcagcctgatattctgtgtctggcgaaagccctgggcggcggcgtgatgccgattggcgccaccatcgcgactgaggaggtgttttcggttctgttcgacaatcccttcctgcataccaccacttttggcggtaatccgctggcttgtgctgccgcgctggcgaccattaacgtcctgctggagcaaaatctcccggcccaggcggaacaaaaaggcgatacgctcctggatggttttcgacaacttgcgcgtgaatatcccaatctggtacacgatgcgcgcggcaaaggtatgttgatggccattgaatttgtcgacaacgaaacgggctaccgttttgccagtgagatgttccgtcaacgcgtgctggtcgctggtacgctgaataatgcgaaaacaattcgtatcgagccaccgctcacgctaaccattgaactgtgcgaacaggtattgaaatcagcgcgtaatgcgctggcggcaatgcaggtgagcgttgaagaggtttaaaaacgatgccggatggcgctgtgcttatccggcctgttttccccgggtcgcggcctcttttttgaatcccatcacaatcaccacattccccttttcccttttacctcgcgacggctacagtagtaactcatccgaccacataacaataattttacatactggatacgcttatgagctacccgtcgctgttcgccccgctcgatctgggctttactactctcagaaaccgtgtgctgatgggatcgatgcacacgggtctggaggaacatcctgatggcgctgagcgcctggcggcattttatgccgagcgcgcgcgacacggcgtagcgttaatcgtcaccggcggtattgcgcccgttccctccggggtcgtgatgaccggcggcgcgatgctgaacgatgccagccagttaacgcctcaccgcgtggtgaccgatgccgtacatgcgcaaggcggtaaaatcgcgctgcaaattctgcacaccgggcgttacagctatcagccgcacctggtcgcgccgtcggcaattcaggcgccaatcaaccgctttatgccgcatgaactgacgcatgatgaaatcttgcagttaatcgacgacttcgcgcattgcgcgcaactggcgcgggaagcaggctacgacggcgtagaggtgatgggatcagagggctatctgattaatgaatttctcacgcggcgaactaaccatcgcgatgacgaatggggcggcgactatgccagccgtatgcgcttcgcggttgaggtagtacgcgcggtacgccagcgggtagggaacgactttattattatctatcgcctgtcgatgctcgatctggtggaaaatggcggcacgttcgacgaaacggtacaactggcgcaagccattgaagccgcaggcgcaagcctaattaataccggcattggctggcatgaggcgcgaatcccgaccatcgccacgccagtaccgcgtggcgcctttagctgggtgacgcggaaactcaaaggtcatgtgtcggttccgctgatcgcgaccaatcgcattaacgatccgcaggtcgccgagacgatcctgacgcgcggcgatgccgatatggtgtcgatggcgcgtcccttccttgccgatgccgaattcctgactaaagcgcaatccggacgcgcagatgagatcaacacctgtatcggctgtaatcaggcctgtctggatcggatcttcatcggcaaagtgacctcctgtctggtgaacccgcgcgcctgtcacgaaacccacatgccgataacgccggccatacgcaaaaagaacctggccgttgtcggcgcaggcccggcggggctggctttcgcgattaacgccgcgtcgcgcggccatcatgtcacgctgtttgacgctcagagtgaaattggcggtcagtttactatcgccaggcagatcccgggtaaagaggagttttacgaaacgctgcgctactaccgtcgaatgatcgatgttactggcgttacgctgaaactgaaccaacgggtgaacgcagaggatcttcagccgtttgacgaagcgatcctcgcttgtggaatagtaccgcgccgcccgccgatagacggtatcgatcatccaaaagcattgacctacctggaggtattgcgcgataaggcgccggttggtaagcgagtggcgatcatcggctgcggcgggatcggttttgacacggccatgtatctgagccagcacggcgaatccaccagccaaaatattgctgaattttgtacggaatggggaattgataccagcctgcaacaggcaggcggtctgcgcccggaaggcccgcgcctggcacgtagtccacggcaaatcgtcatgctgcaacgcaaaaccagcaagccgggcgaagggttaggtaaaaccaccggctggatccatcgcgcgacgttactggcgcgcggcgtgaagatgatcccggcggtcagttaccagaagatcgacgacgacggattacatctcttgatcggcggcgaaccgcagttgctggaagtggatcatgtggtgatctgcgccggacaggaacctcgccgcgagctggcggacccgttacgcgccgcaggtaaaacggtacatcttatcggcggatgcgatgtcgcgatggagctggatgcccgacgggcgattgcccagggcacccgactggcactggagatttaacgactttgcctgatggcgctacgcttatcgggcttacgccgtcataccggttttataggccggtatgacgcttgagcgccttatcgacggcgtccctgcttcaccgctttcaaaatgacaaatttattgttggttgctatcgtcgcgcaattaccgaaaatcttcttcagcttgtggaaatagtccagatggcggttcgccacaatatacagttcgccgttgattttcaggcagcggcgggcgtgatggaacatctcccaggcgatattgtccgtcagcgcatgtttctggtggaacggcggattgcagaacaccgcgttaaaacggaacggctccacgccggagagcgcgttgttgatcataaattcgcagcgttcgaatgcttccggcaggttcgtttctacattcaaacggctggaatctaccgccatcggcgattcatcgacaaatactacgttcgcctgcggatttttcgccagtaagctcaggccaatcaccccattgccgcagccgagatcgacaatctccccgtcgaggttttccggcaaatgctgcataaagaagcgcgcgccgatatccaatccggtacgagaaaacacattcgcgtggttgtgaatcgtccagcctgtatcttccagtttccagcttagcgtttgcggcgcgtcggccagttgcggatgactgaaggtacagttaatcaggcgcgctttcttccacgccagcgtcgtcgtggttgggcccagcactttttcaaacagttccagcgtagaggtatgaatatcacgcgctttcgcgccggcgataatacgcgtttgcgccgtaacgaccttacgcaaagcgcgtaactgctgttccagcaacgccagcgttttcggtaccttaatcaataccacgcccggcgcctgcgggtagtcagcggtactgtcgagaaacgttacgctggactccgcgatgccgttatggcgtaaattctctcgcgtacccagttcgcttaaatacgaatcgccaatactgtatggcgaatgctccgccagcgcacagcttagcgcgccaaacgtatcattcaggatcagcaccgggccgcgaatttccgtctcatccaactgttgcagcagatactcatcggccgcctcccacgccagaagcgggttaacatcatccgtttgcggaaaacgtttcagcgtcagtgaacggaaaccgtcgtctacgtggctcattaggcctcctgaatggtaaaattgcggcgttatccctgaaaagggtgcgtgagtatacactttttatcagcaacatggagctttgatgacctcactaacttaccttcaggggtatccggaacatctccttgcccaggtgcgcgccttaatcgccgagcagcgcctgggagcagtgctggaaaaacgttatcccggcgcgcatgattacgccactgacaaagcgctatatcactatactcaggaactgaaaagtcagtttctgcgcaatgcgccgcccattaataaagtgatgtatgacagcaagatccatgtgctgaaaaatgcgctgggactgcataccgctgtctcgcgcgttcagggcggcaagctcaaggcaaaggcggagatccgcgtcgccaccgtgtttcgtaacgccccggagccattcttacggatgattgtggttcacgagctggcgcacctgaaagagaaagatcataacaaagcgttttatcagctctgctgccatatggagccgcagtaccatcaactggagtttgatacgcgactgtggctgacgcatcaggcgctgtcggcacaataaattctgaaaatgccccttcccccgtatctttttaacggcgtgggcataaaatcggcgcgttcacatttcgctcattgcctgccgccacgtcaaggatgacgatctgtagagggtattttttatccaccgccaacggaaccgcgcaacgaccatgctctcacaatgtgcccgttttatccgccgcctctgttttacacgccgggccttaacagtggcgtgttttctgcttgtcgcagcaggcgtcgcgcttttctattccaactggcttatcgtcaacgcctcacagcatctgacatggaatgacattcagaccgttcccgcccgcaacgtcgggctggtgttaggcgccaaacccggcaatcggtattttacccggcggattaatactgccgccgcgttgtatcacgccggtaaagtgaagtggctgttagtcagcggcgataatggcaaaaaagagtacgatgaaccttcggcgatgcagcaggcgctgatggcgaaaggtgtgccggaggcggccattttttgtgattatgccggattctccacgctggactccgtggttcgcgcccggaaagtgtttggcgaaagccgcattacgattatctcgcaagcatttcataatcaacgggcgatctggctggcgcaacaatatggcattgacgctatcggcgttaacgcgccggatctgaataaaaggcacggaacctacacacgacttcgggaaaagctggcgcgggttagcgcagtgctggatgccaaaattttgcatcgtcagcctaaatatctgggcgctggcgtcactattggggctgatagcgcacacgggtgcccttctcgccagtaaaatgccagagtgcgtcgcagcgcactggcaagggcggaaaggcgtgctacattgacgaaaaatccctttctggagtccgctgacgtttatgatacgtttcgctgtaattgggactaactggatcacgcgccagtttgtcgacgccgcccatgaaaccggcaaattcaggctcgccgccgtttactcccgtagtcttgaacaggcgcagtctttcgcaaatgattatcccgtcgagcatctatttacctcgctggaagcgatggcgcaaagcgacgcgattgaggcggtttatatcgccagcccgaattccctgcatttctcccagacgcagcgctttttgcagcataaaaaacatgtcatgtgcgaaaagccgctggcttctaacctggcggaggttgatgccgctatcgcctgcgcgcgcgataatcagcgggtactgtttgaagcctttaaaaccgcctgcctgcccaatttcctgctgctgcgggaatcgttgccgaaaatcggcagaatgcataaagcattactaaattactgccagtactcttcacgttatcagcgctatctgaacggtgaaaatccgaatacgtttaatccggccttctccaatggttcgattatggatatcgggtattactgtctggcgtcggcgatcgcgctatggggcgagccgcgcagcgttcaggcgtcggcgaatttattggaaagcggagtagatgcgcacggcgtcgtggttatggattacggcgattttagcgtcacgctacagcattccaaagtcagcgactcggtactggccagtgaaattcagggcgagaggggatcgctggtcattgaaaagctgtcggaatgccagaaagtgtgttttgcgccgcgcggcgcgctgatgcaggatctgacccagcctcagcatattaataccatgctgtatgaagccggggcgtttgcccagcttattgaaaaccacgccgtggaacatccggggttgtcgctaagtcgcgccacggcaaaatggctgacagaaatacgccgtcaaaccggggtcatcttcccggcggacgatctgacccatccccttactgcgtaaaattatgtaaatcatatgttacaggtcattgactctacgcgtggcctgtcatactttgttacgcgcaaaggggagtaacttcattgccggtcgatcgtcattacgatgtgtgcaaaaccacatccggtcaccgggcagccataaaggaatgcgtcagcgtattcctttattgttgtaagtgagaccttgccgaatggcaaggtctatgcataaaagcaacggctaatgccattcggcgttagccgttttttttttttgcatagggagaaataatgaatactgttggtacgccattattatggggtggattcgcggttgttgtggtgataatgctatccatcgacctgttgttgcagggacgccgtggcgcacatgcgatgtcgatgaaacaagcggcaggatggtcaatcctgtgggtaacgctctcgctactgtttaacgccgctttctggtggtatctggctgaaacgcaagggcgcgaagttgctgacccgcaggcattggcgttccttaccggctatctgattgagaagtcgctggccgtagataacgtctttgtctggctgatgctgtttagctatttctccgtccctccggctctgcaacgccgggtgctggtgtatggggttcttggcgcgatcgtgttgcgtactatcatgattttcgccggtacctggcttatcactcagttcgaatggctgctgtatgtgttcggcgccttcctgctgtttaccggcgtaaaaatggcgctggcgaaggaagatgaatccggcattggcgaaaaaccgatggtgcgttggctgcgcgggcatctgcgcatgaccgatacgatcgagaacgagcactttttcgtacgtaaaaacggcctgctgtatgccacgccgctgctgctggtgctgattatggttgagttcagcgatgtgatcttcgccgttgacagtattccggcgatctttgcggtcaccaccgacccgttcatcgtactgacctctaacctgtttgccatcttaggactgcgcgcgatgtacttcctgctgtccggcgtggcggaacgcttctcgatgctgaaatatggtctggcggtcattctggtctttatcggcattaagatgctgatcgtcgacttctaccatattcctatcgcgatttcgctgggcgtagtgtttggtattctgaccattacgctggtgattaacgcctgggttaaccatcagcgcgataagaaactacgagcgcaataatcttttatcggggtaaacctgccccgtcaaaaacgcccgacagcgcacacctgtcgggcgtttttgtttaacatgtcacaatactgttaatataaagttataaaacatgatcacagcaaaaaatccaggatatttcgcttcccgaaccttcaactttccttatactcaaccaggcaaacactttgttacatcctgaaagatgcgccgtaagagcgtgcaggggatgaccagcaacacaatacaaggaatatgaaatggctacgcaacgagcatcagggctactgcagcgtttagcgcaaggcagtctggttaaacaaattttagtgggtctggtactggggattttactggcatggatttctaagcctgcggcagaagcggttggcttgcttggcaccctgttcgtcggcgccttaaaagcggtcgcccccgttctggtgctgatgctggtaatggcctcgatcgccaaccaccagcacggccaaaaaaccaatattcgccctattctctttctttacctgctaggcaccttttcagccgcgctggcggccgttgtgttcagcttcgccttcccttcaacgctgcatctgtccagtagcgcccaggatatcgtgccgccgtccggcattgtagaagtcttgcgcggtctgctgatgagcatggtgtcgaaccccatcgacgcgctgctgaacgctaactatatcgggattctggtatgggccgtcggtctgggatttgccctgcgtcatggtaatgaaaccaccaaaaacctcgtgaacgatatgtctaacgccgtgacctttatggtgaaactggtgatccgtttcgcgccagtcggtatttttggtctggtttcatcaacgcttgcaaccaccggcttctccaccctgtggggctatgcgcacctgctggtcgtcttgattggctgtatgctgctggtcgcgctggtggtcaacccgctgttggtattctggaaaattcgtcgcaacccttatccgctggtgttcgcctgcctgcgtgaaagcggcgtttatgccttctttacccgcagctctgccgccaatattccagtgaatatggcgctgtgcgaaaagctgaatctggacagggatacttactccgtttccattccgctgggcgccactatcaatatggccggcgcggcaattaccattacggttctgacgttggcggcagtccatacgttaggcgtcccggtggatctgcctacagcgctgctgctgagcgtggtggcctcgctgtgtgcttgcggcgcctccggcgtggcaggcggttcattgctgctgatcccgctggcgtgcaacatgtttggcatcccgaacgatatcgcgatgcaggtagtagcggtcggctttattatcggcgtattgcaggattcgtgtgaaacggcgctgaactcgtctaccgatgttctgttcactgcggcagcctgccaggcagaggacgaacgtctggcgaataacgccttgcgtagctaagtgattatcgatgccggatggcgtatgccatccggcgtaacgatagatctgaatctcccaatccataggctgtgatggaaagcgaattgatgttcacgcgcaacatcctcgcgtaacgttatatgtagatggcgtctgccgcggcgctcggtcagcgtaaagtataaagtgtcagcctgtgtaaatcctctcgccaccctcccttgcgataagcaaaatcaaagctcaacgacgcgtaatttctataacggacttcgttgacctttgttacaattagatgcattttgaatttttgtgtgttagtgcttgcttacttcacaacttaacaaggaatagttcaggccgcgaatttgccgtttccgcaacgctgataaaaactccaactctgttgcggcagtgcaaacctcagatcaccggcgtgacgttaaccgattctccaggaatactgaatggaactactgactcaattgctgaatgccctgtgggctcaggactttgaaacactggccaatccttccatgattggcatgttatattttgtgttatttatgattttgtttctggaaaatgggctgctccctgccgcctttttgcctggcgacagcctgttgatcctggtcggcgtgctgatcgccaaaggcgcgatgggttatccacaaaccattttgctgcttaccgtcgcggccagcctgggttgctgggtcagctatattcagggccgctggctggggaatacccgcaccgtgcaaaactggctctctcatctccccgcacattatcatcaacgcgcccatcaccttttccataaacacggcctgtcggcactattgataggccgttttatcgcgtttgtcagaacgctgctgcccaccattgccggcatatccggtctgaataacgcgcgctttcagttcttcaactggatgagcggcttgttgtgggtgcttatcctgacgtcgctgggctatctgctgggcaaaacgcccgtctttatgaagtatgaagatcagttaatgtcatgcctgatgctgctgcccgtggtgctgctcttttttggcctggcgggttcactggtcatgctgtggaaaaagaagtatgggagccggggataacttatgcttaaaccacgcataactgcccgacaactcatttggatcagcgcttttctactgatgctgaccatactcatgatgacgtggtcaacgctgcgtcagcaagagtcgacgctggccattcgcgcggttaaccagggcgccagtatgccagacggcttctcagttctgcatcatctggatgcgaacggcattcattttaaaagcattacgcctaaaaatgacatgttgctcattaccttcgattcccctgcgcaaagcgccgcagcaaaaacagtgcttgatcaaacgttaccacacggttatgtcgtcgctcagcaggacgatgacaacgaaacggtacagtggctgtcccgcttacgggaaagctcacaccgctttggctaatctccaggaatccgaatcatatcactcactttggtgatttcattgtttaatgactatgattaataaagcggtgtttaacccaccgcgttattatcgggatcaccgccccggacaacgggtccgaacataagggaaagttcaggaatgaaataccgcatcgctttggctatcacgctttttacacttagcgccggtagctacgctaattcgctttgtcaggaaaaagagcaggatatacaaaaggaaattagctacgctgaaaagcacaacaatcagcgccgtattgagggtctgaacaaggcgctcagcgaagtacgcgccaattgtactgacagcaagctgcgcgccgagcatcagaaaaagatcgctgagcaaaaagaagaggtagccgaacgccaacgtgatttagccgaggcaaaagcaaaaggcgatgcggataaaatagacaaacgtgaacgtaagctggccgaggctcaggatgagctaaaaaaacttgaggccagagactactaaattaacgccgaatgtaaatactcactcacctggagaaaactatgtcgaaagataacactacggaacatctgcgcgctgagttgaaatccctgaccgatacgcttgaagaagtgctgagctcttcgggcgaaaagtcgaaagaagagttgagtaagattcgtagcaaagccgagcgcgcgctgaaagagagccgttaccgcctgggcgaaacgggtgatgtgattgccaaacagactcgcgtcgccgccgcccgcgccgatgattatgtgcgcgaaaatccctggacaggcgtaggcattggcgccgctgtcggtctggtgttgggcgtactgctgacgcgtcgttaattatggcggagtctcgacaggcacaaggaccaggcaaaagcgtactgggtatcgggcagcggattgtcaccattatcgttgagatggtggaaacccggctgcgactggcggtagtagaactggaagaagagaaagcgaacctctttcagcttttgctgatggtaggtcttaccatgctcttcgcggcgtttggcttaatgagcctgatggttctggtcatctgggctatcgatcctcagtaccgtttgaacgcgatgatcgctaccacagttgtgctgttagtgcttgcgctaatcggcggcatctggactttgcgcaaagcgcgtcagtccacgctattgcgccatacgcggcacgaactggctaacgatcggcaaattctggaggacgatcagtcgtgagcagcaaaggcgaacgcgaaaaacgtaaagcgctgcttctcagtcagatccagcagcaacggctggatctgtccgccagccgtcgcgactggctggagaccaccggcgcgtacgatcgcggctggaatacggtgttaagcctgcgctcctgggcgctggtcggtagcagcgtaatggccatctggaccatccgtcatcctaatatgttggtacgctgggcgaaacgcggcctgggtatctggagcgcctggcgcctggtaaaaactaccctccgtcaacaacagctccgcggttaatatcttttcttttatagcatcgcgccatcaggttatcacctggtggcgcgatacttttatgcatatcgtctctttagcaatcactcaaattttttgaaaaaatttggcaattttccttgctaacaattcctgcacgccacgtttatgattctctccagcgataacaatgatgcgcaaaaccgcgtcattgctcatgaaaatagcagcagccgccgaatcggcccctggagaataaaatgaaaaaattagaagatgttggtgtactgatagcgcgtattttaatgccagttctgtttattaccgcaggatggggaaaaattagcggctatgcgggcacacagcagtatatggaagcgatgggcgtaccaggattcctgctgccgctcaccatactgcttgagttcggcggcggtctggcgattctgctggggttcctcacccgcaccactgcgcttttcaccgctggttttacgttgctgacggcattgatcttccatagcaattttgcagaaggtgtaaactcgctgatgtttatgaaaaacctgaccattgccggcggattcttattactggcgttaaccgggcctggcgcgttcagccttgaccgtctgctgaataaaaagtggtaagcaatctatactcaattaaaaaagcgagggaatagcgcctcgcttttgtcatctgaaggagagagacatgggacaactgatcgatggcgtctggcacgatacctggtatgacaccaaatcttccggggggaaatttcagcgttcagcgtcggctttccgcaactggcttaccgctgacggcgcgcccggaccttccggcgaaggcggattcgccgcagaaaaagatcgttaccatctgtacgtttcccttgcctgcccctgggcgcatcgcacgctcattttccgtaaactgaaaggtctggagccgtttattccggtttccgtcgtgaatccattgatgctggaaaacggctggacgtttgatgatacttttccggcggccaccggcgataccctctatcagcatgaatttctctaccagttgtatctgcacgccgatccacactacagcggccgcgtcaccgtaccggtcttatgggataaaaaaaatcatactatcgtcagcaacgagtccgccgaaatcattcgtatgtttaactccgccttcgatgggctgggcgctaaagccggggattactatccccccgcgctgcaaagcaaaattgacgagttaaacggctggatttatgacaacgttaataacggcgtttataaagcaggcttcgccaccagccagcaagcgtatgatgaagcggtagacaaggtatttactgcgctggcgcgcctggaacagattctcggacagcaccgctatctgacgggcgaccagttgaccgaggcggatatccgcttatggacgaccctggtacgctttgatccggtttacgtgactcatttcaaatgcgacaaataccgaatcagcgactacctgaatctgtacggtttcctgcgcgatatctatcaaatatcgggcattgctgaaactgttaatatggaccatattcgtcaccactatttccgtagccataaaacgattaaccccacgggtatcatttctgtcggaccgtggcaggatctgctcgaacctcacgggcgcgacgtgcgctttggctaatttcaggcgtcctccgggacgccttattaataaataccacaaatatttaccagcatttcattcgcggctattcttagtttgattactttaaaaacaagtgattgaaccattattgaggcgaaaatggattggtatttaaaggttttaaaaaattatctgggatttggcggccgcgcgcgacgcaaagagtactggatgtttattctggtcaatatcatctttacctttgtgttgggcctgctggacgccatgcttggctggcaacgcgccgggggtgaaggcgttctgaccaccatttacggcgttctgatctttttaccgtggtgggccgtgcagttccgtcgtctgcatgacactgaccgctccgcatggtggctactgttgctacttatccccattatcggctggcttatcatcatcgcgttcaactgccagaatggtacgccgggcgacaaccgcttcggccccgatccgaaacgtttttcctgatggcggcgcggcgccgcttttaaagcgccgcgcgctatttattttccggcgaatagcttaggtatttcccgcaggcaccaggcttttgcctcccccatactgtcgcgccgccaggccataataatatcgatttcgctggtcgattccgggctgaccacgcgtagccgcccttcggcaatatcctgttccaccatcgaatatggcatggtcgcgacgccaagcccggccagcagcgcctgacgtttatcttcaatcgtgcttaccgtcagacgtggctgcttatccagcagttgcaccgttaataccggccgctcgcgcgcggtatccgctaccgctacgccgcggtatttaacccgcgtcacttccgaaagcggctccggctcctgatgaatagggtggtcaggcgcggcgacatacacattcattaacgtatacaacttacgggagttaatttccgacgacgatcgaaaatgcatatccggagcgataacgatatccgcccgtccctgctcaagccgctcccatgcgccagccagtacttcggtaatcaatgaaagctgcgtattggctttagcggccagccggtcgatcagtggaaaaaaagcaggcgtcggtaccagagcttcagtgactagcgtcagatgcgtttcccaaccgcgggccaacgcttcagcatccgtcgttaacttgtctgccgcttccagcaatacccgcccgcgttccagcagcatacgtccgacgttggtgaattttgtacgatggccggagcgatcgaacagtacaacgtccaactcttcttccagcttctgcatggtgtaactcagcgcggagggcacacgccccaactcatcagccgctgcggcaaaactgccccggcggtcaatggcgtccatcacacgcaatgcttcaagcgtcagcgctctctctttagccataacgttctcattcaggaaatttgaacataccgggcagaatatctggctaacaatgcagcgtccagccccttaacataaaaggaagtaaagagaggttaataacgatgattacgacccgaaccgccaaacaatgtggacaggcagactacggatggctacaggcccgctataccttctcctttggacactatttcgaccctacactgctaggctacgcgtcgttgcgcgtactgaaccaggaagtgctggcgccgggcgcctcttttcagcctcgaacttacccaaaggtggatattttaaacctgattctggacggcgaagcggaataccgcgacagcgacggcaaccatgtacaggctaaagcgggcgaagcgttactgctcgccgcgcagccgggcattagctacagcgaacataatatcagcaaagttaagccgttaacccgaatgcaactgtggcttgacgcctgtcctgaacgggaaaacacgctggtacaaaaaatcccactcctggcggcgcaacaacagcttcttgcctcgcccgacggtgagcaaaacagcttacaactgcgccaacaggtctgggtacatcatattacgctggagaaaggcgaatcgcttaatttccagcttcacgggccgcgcgcctatttgcagtcgattcacggtacgttccacgcgatgacgcacaacgaagaacgcgaggcgttaacctgcggagatggcgcatttattcgtgatgaacctaacattacgctggttgccgatacgccgctgcgcgcattactggtagatttaccggtgtagccagccagaaaaggagtcgcaagatgagcaaaaaatcggcgaagaaacgtcagcccgtggtaaaacctgccgtacaggaggcgatgagcgccgctgtgccgctgggctatgaagagatgctaaccgaactggaagccatcgtggcggacgccgaagcccggctggcagaagaagaggccgcagcctgaaatcatgccggatggcggcgcaagcgcccgatccggctgataacgggtagacccgataagcgcagcgccatcgggcaacacgctgccccgacgtcatgccggggcgttattattaatgcgctttactggccataatctcgatgatctgcttgtcggtctgctgcattgagcgacacgccagcgaacacaaattcgaaatagattgttcgacattgtgcgccacaatcccttcgtttccggtcaccgccgtatcatccaacgccatcagtacggctttccacgccgccgacgcgctggtagagactttcatcgcgcagctattcgacgcgccatcgcaaatcatcccgctgacatcaccaatcatactgctgatagccattgcgatagtgtcgtaacgaccatctatcagccacgccatacccgctgccgcgcccatcgccgccgtagttgccgcgcacagcgccgacaaacgcggaagctgatggtgaatatagatagcgctcaaatgcgataacattagcgcgcgcgccaggcgctcgtcatcggcgccgacatgttcagcaaccaccatgactggcaccgtggcggtaatcccctggttgccggagccggagttgctcatcgcgggcaacgtggcaccgcccattctggcgtctgacgccgcgctggtacggatcaaaatcgccgtggagagatctttcgccagcagaccgcgatcgcactgtttggccagcgtcgaaccgatatgcagcccccaggaaccacgcagtccctcctgcgacaacgcgccgtttagcctggccgcatcgagaataaagcggatagcgtcaaagggcaccgcattcacaaacgccaggatctcttccagcgaggtatgagacagcactcccagtggcgaggttttttcttcttcctgcgcattatcggcctgggtaaataccacacccttgtcggtttctatccgcacaatatttgtatgatcgccgacgatcgtgacacatgcccagctatcgccgctatacactttcgcccgtgaaaacagaatatcgttacatggctcctgcaacatcaccgcgacatgtccagcggccagcatcgcttttgcatcggcaacggctttagcggaagcgtcttttaacacctccaacccggctttcgcatcaccgcccaacgcgcccaacgccgcggcgatcggtagccctaccattcccgttcctggaacggtaacgcccataccatttttcatcagattgggcgaaacccacgcgtcaatgcgttcaactgtgccgttaagttcagccgccgccgccgctgccgccagcgccagtgaaattggctcagtacaccccagcgccggttttacttcttcctgtacggccagaataaaactttgccacaatggatttattttagattcaaacataacaacaaccttaatctcaggtatatcaagagaatgccaggaacggagaaacgcatagcagcagaccggtaataataatcaggtacaacgaagcgcctttatatttgtgcaatgcgggaaccttgtagaccaaccatgccggaattaaacagcccaccataccgaagatagggctacaaatagaggtgaagctcagtaccggcgcgttgagcacaatggcgctccaggccagcaaaatagcgaaaatcataatgccgcgctgtaccagattttccttaatcttctcggcgggcattttacggcgcaggatattcatcacaatgccttgcgtcgcttcgcggaatcctaaataaacgccaaagaaggcggtcatgacggcaaagatgttcagaattacgctaaccactttgacccagccagcgccatcgccgctaataaattgcgcggcgatcgccagggcggaaatattctgctcgtaggctttcaccgcttcgtcatgccccatcgccagggtgaaggaaaccgcatagaaaaatacggtaacgaacaggatgccaaacgcaatattcatggcacgcagcgctttatggcgtgcgacctcaatagatttttcgcgtgaacggtaagagatcaccattgggcttaacgtctggataaataaaatcgaggtcagcgtaaatggcagggtaataatggcgtttttaatcagcagggccatcggcggcagcgcgccaatgttatacagatgccacatacccaccatagagacgcccagcgccgccactaccagtagcttggtcagcaccatgccagtggagattttgaacagtaatttttcaccgcgtgaggaaatcgccaccaggatgcagatcagcaccagaccataaaatggactatcggaaagcaatccttccgttacgccgaaagtatgcagataagaggcgctgtcgttagtaatcgccgtagaatagacgaacatccagatgacgagcatcacaaagtacagcgcgcctaataaaataccccagtttttgcccagatagccgctgatcacgctggggtagtctttacattccggggattccgccagcgtattaataaacagccgctggaacaggtacatggccggatagccaataatagaagagagtaaaaagacccaaagtcccatcaggccaacctggacaggaagaaaaacgatccctgcgccaatcgccatcccgatactcataatgacccaaccggtgtcggtactatcaaatttgatggcttcacgccattcgctttcagtcatccctgcccgacgcgccggggctgatgcgtcgaggattacgctggtattacttgccgattccataaaattctcgctcaatgtgtaggtagaggttttttttatttttcgtgccgcagcaaggcgatatgcagaacgtgaggtgcaggtactttcttgtaataagaaaatcatacgcgcacgataagagaaaaacttaccaataaaacgcctgcatttcttgtgggttaagaattcttttctatttactattggtttaatgttgttattttctctatttgacgcgtatcacaacaaaaaagggcgcactttggtgcgcccttttctcaacttctgtcttctacgttatcccatagcctgctcactctgcgcctgtcgggcctatccacaaacgactttaatcgccagaccgccgcgcgacgtctcgcgatatttgtcgttcatgtctttacccgtttcgtacatggtttcgattactttatcgagcgaaacccgcggttcagaggtacggcgtagcgccattcgcgccgcatttaccgctttaacggcgttaatcgcattacgttcaatacaagggatttgtacctgacccgccaccgggtcacaggtgaggccaaggttatgctccatcgcaatttccgccgcaatacagacctgcgccgggctgccgcccagcagttctgtcagccccgccgccgccatcgaacacgcgacgccaacctcgccctgacaccccacttccgcgccggatatcgaggcgttcatcttgtacagcataccaatcgcccccgccgacagcagataacgggcgatagagttggcattgaccggacgacggaatttgtcgtaataggccagcaccgcaggaataatgccgcacgcgccgttggtcggcgcggtgaccactcgcccgcccgccgcgttctcttcgctcacggccagggcgaacatgttcatccagtcaataacgttcatcggatcgcgggagagattatcgctggagaccagcagacgccgtaacgctaccgcgcggcgtggaacgttcagcggccccggcagcacgccctcagtattcatgccacgttcaattccggtcgccatcacctgccagatgcgggcaaagccagcgtcaatctgctctttgctccgcaacgccagttcattttgcatcatcaggccggaaaccgagagcccctgtctttcacacagcgtcaacagttcgctggcggaatgaaaatcatacggcaccgatttttctacatcgtgcgactgaccaaaacgctcctcttcgacaataaagccgccgccaatagagtaatacgttttgtgtaaaagcggcgcttgtccgttccaggcggtaatacgcataccgttttcatggcgcgccagggtttcagcgtgaaagaaaatactgtcggcgacgggaaaatccaccacatgcgcgccacccgccaccgataaacggctgctgcgggcaacctcctggataaacgccggaatgctatcaatattgacatcctgcggcgtattgcccgccaggcccataatgacggcggtatcggtcgcgtggcctttgcccgtcagcgatagcgatccgtaaagatcaaccgtgatgcgcgtcgttcgcggcaggtcgccgctgtcgatcagccgatcgataaaacattttcctgcattcattggccctacggtatgggagcttgaaggtccaatgccaatcttaaaaatatcaaatgcgctaatcatatctccccctaagattaccgttcagcgaagatccgtcgcggggcgatccacacgatcgccccgttcacgttacatcgcctgagtaaaggtgcgcgaaataacgtcctgttgctgttcacgcgtcagcgcattgaagcgcacggcatagccggaaacgcggatcgtcaggttcgggtagttttccggatgttcaatcgcatccagcaacatttcacggttcatgacattgacgttcagatgctgcccgccttctacctgtgcttcatgatggaaatagccgtccagcaggccgacaagattggttttccgcaccgcatcttctttcccgagcgccgcaggcacaatcgagaaggtgtacgaaataccgtctttggcgtaggtaaacggcagtttcgccaccgacgtcagcgaggccaccgcccctttgcggtcacgaccatgcatcgggttcgcccccggcgcgaacggcgttccggcgcggcgtccatccggcgtattgccggtcttctgcccgtacacgacgttcgaggtgatggtcaaaatggactgcgtcggcaccgcattgcgatacgtcggcaacacgctaattttttgcataaagcgtttcaccaggtcgcaggcgatgctgtccacgcgctcatcgttgttgccgtactgcggatactcgccttcaatagcaaagtcgatggcaaggccgttttcgtcgcggatcggcttcacctgagcgtacctgatggcggacagggaatccgccgccaccgacagtccggcgatgccgcacgccatcgtccgatacacatcacggtcgtgcagcgccatcagcgaagcttcatagctgtacttatcgtgcatgtagtgaatgatgttcagcgcgctaatgtactgcaccgccagccagtccataaaatggtcgagactctccattaccgcgtcataatccagcacctcatccgttaacggcgcggttttcggcccgacctggattttcagtttctcatcaacgccgccattgatagcgtacagcaacgttttggcaaggttggcgcgcgcgccgaagaactgcatctgcttaccgatgaccatcgggctgacgcaacaagcgatggcgtaatcgtcgctgttaaagtcggtacgcattaaatcgtcgttttcatactgcaaagatgaggtcacgatggagacctgcgcagcatatttcttgaatgccaccggcaacgcttctgaccacagtatggtcaggttcggctccggcgctggccccatcgtgtgcagggtatgcagataacggaaggagttcttcgtcaccagcgtgcggccatcaagccccatcccgccaataacttcggtggcccagatcggatcgccggaaaagagcgaatcaaattccggcgtgcgcaggaaacgcaccatgcggatcttcatgatgaaatggtcgatcagttcctgcgcctgctgctctgtcagaaggcccgcgttgaaatcgcgctcaatgtagatatcaaggaacgaggcggttcttcccagcgacattgcaccgccattttgcgattttaccgccgccagataagcgaagtagagccactgtaccgcttcctgcgcgttccgcgccgggcgggagatatcgtagccgtatttcgccgccatctcctgcatttgcagcagcgcgcgacgatgctccgccaactcctcacgcaggcgaatcgtcgcctcaagattctgtccctgctccagattcgactgcaggtcggcgaattgcagctcgcgttcgcgcaccagataacggatgccatacagcgcgacgcggcgataatcgccaataatgcgcccgcgaccataaccatccggcaaaccggttaatacgccggatttacggcagcgcagcatatccggcgagtaaacatcgaatacgccctgattatgggttttccgcaggtcggtaaaggtatattcaaaatcggcgtccatttcgcggccataagcgtggaatgaacttttgatcatgttaacgccgccaaacggatgcaaagcgcgtttaagcggcttatccgtttgtaaaccgacgattttttccagctctttttcaatataccccgcatcgtgcgcggtaatcgtcgtcgcgatgttggtatcgaaatccaccggcgcatgggtcgcgttctcgatacgtattcccgccatcaccttttcccacagcgccgtggtcgctggcgtcgcgtcggcgagaaaagattcatccccctcatagggcgtatagttatgctgaataaaatcacggacattaatttcttctttccagtccgtacctttaaaatcacgccatgcttcggcatacagcatatcgctggtatcgatatttaccttcatgaaaaataatctctctacagaacagccgttaagttatgcaaattccactggtgctttcacgttgcctaaatgaatggcatcaagggcaatcattttctcttcattcgtgggaataacagcgcaaataacctgagaagggttagcggaaataatgcgctcgccgtgagaattcggctgcttattcatttcaacgtctaacgtaagccccagtacgcccagatgttcaatgaccaactggcgaattaatactgaattttcaccaataccaccggtaaaaataatgccatccaaccgatgtaacgatgccgcgtgtccggcaatatgacgggcgatacggtgaacaaacgtttttatcgctaaccgggcgcgctcatgtccttcgtgccaggctttttccaggactctaaggtcggatgacaaaccggagatgccgagcaaaccggactctttattcaccactcgctccagatcgctcaacgtctgcccggtttctttggctatccacgccatcgcgccgaaatcaacgtcgccgctgcgagtccccatcatcagcccctcaagcggcgtcatccccattgaagtatccacgctctgaccattgcgtaccgcgcagatagacgccccattgcccagatgcgcgacaatcagacccgagtctttttcatcgaggtcaagcagttcatacgcgcgccgcgaaacatagcgatgcgacgtaccgtgaaagccgtagcgacgcacgcccaggctggaaaaatactcccacggcaatccgtataaataggcttccggcgccagcgtctggtggaaactggtatcaaataccgccacctgacgcacggccgggaaaagatgccgcgccgcgtcaatgccgcttaaattagcgtaattatgcagcggcgctaaaggcgatacccgacgaatattatcgataatctcatcggtaataatgacggactgcgtaaataactctccaccgtgcgcgatacggtgaccaattaatgccacgctatccgttaaatcacgtttttccagctcaaaggcaatggcttttaacgcgtcctcataattagagtgtgcgaggtttatcggcttatcgccattaatagataaaaaggcgttttcagtattcattccatctgctattcccgccattaaaacatcacaggtagcgacatccagtacagagaatttgatagaagatgatccgcaattaatgaccagaacgaccggaaattcattcatgtagtgcctccgtcgatgtcagcctgcgtccgcgccctggggcggacgcaggctaaacgtgaggattagaacaatttgtagacaatattcaggatggtcagcagaccaatcagggtgacgaacacgttatccagacgaccacggtacttcgccagcgacggcgctttacgaatggcgtacatcggcagcaggcataacagcgaggcgataatcggcgcgcccatcgcttcaatcaggtccagaatgttcgggtttgcgtaagctacgacccaggtagaccccataatgaagatcatgctgatggtgttaagcttgcccatagagactttggttttatcgcctttataaccaaatttcagcaccaggccgttcagcccttccagcgtccccaggtagtggccgaagaaagatttgaaaatagcaaccagcgcgatgatagacgcgccatactccagcaccgttgcaaaagtagattttgtccccgacaaagaggcgaaatggttggccaggtaggaaagtaccggaatgttctgcgctttcgcatccgccatgttctgcggggagagcgtaaacaggcagctaaaggcgaagaacatcaccacggcgaccatcagcatactggcgcgcgagatgatctgtgaacatttacgctcggtaaattcgcggccaaactctttctcatactcttcacgcttagacaccacgaaggaagagacgatgggcgaaaagttaaaggagaacaccatgatagagatgcccagccacaccgtaaccagtatgccatcgtgcccggtcagcgcgatattactgagatcaacctgatcgataaccgccgagttccagtaaggaatcagcgataatgagattagtaccagactggcgataaacggccataccaggtaactcatcaccttaaccatcagatctttaccaaaccagatcacaaaggccatcagcagcagcaagaacagcgccacgaaaccgcgattcaacgctggcatctgcagctggttttcccaaaacgtcatgaacgtgttagtaatggtgacgccataaatccacagcagcggacaaatcgcaaagaagtaaaggaacgtgataactaccccgcccgttttaccaaagtgctcttcgaccgtttccgtaatattgccggacggattagatccggataaacacagacgcgccagcgcccggtgacaatagaacgcaatggggtaagctaaaaccagcatcagaagaatggggataagcccgccaaacccggcgcggatagggaaaaacagcaccccggcgccgatggcggtaccaaataaacccagcgtccacgtcgtgtccgatttacgccatgacgactgttttgcctggctggatacaatgctatcagtagtactcatatcctatcctcacgaaaagattaagcgtcaactaaacccgtaatttgtgatacccgagaaagatcgatattgccgccagaaataatactgaccgtttttctgttctgaatatggctatctaatttcccacttaatagtgcggcgcaagccagagcgccagcgccttcagtaataaccttattgcgctgaattaaagcgatcatgctgttacgaatttcatcttcgctaaccaggacaatgtcatcgactaattcacgaacgatttcataggttaaattacccgggcgggagacatcacaaccatccgccagggtgccggtcgttcggtgcgtggttatttcgccagtgtaataagacgccgccataccgtgaacattttcggcctgtacgccgataactttaatggtcgggttaatcgatttaatcgcaatggcaatacctgcaattaaaccgccgccgccaataggcacgatgacattatcgacatcgtacagatcttccataatttccagaccaatagtgccctgtccggcaatgacttttggatcgtcgtaaggcggaataaaaatgcggccttcggtttcgacaatttcactcaccttagcgatggtgtcattgaagttgtcaccgtggagcaccacttccgccgaataatcacaggtggccgccacttttgactttggcgcgcccttcggcatcacgactttgccgtcaatacccagcattgcgcaagaaagagaaacgccctgtgcatgattacctgcggaacaggccacgacgcctttacgtttttccgcctccgttaacgagctaagtttgttaaaagcgccacgaattttaaatgaacccgtacgctgcatattttcaaacttgagaaatatttcgcctttgcaacgttcactaaaatagttagagcgaggcattcccgttttatatatcttccccgccagtctttttttcgcttcgaggatatcttcaattgcaaccgggagatcgtatgtaatgtgcattataacctcttaacctgggtattaaaaataagttaccgttgcccactgttcaaaagaaacaggtgacgtcaatttcgctaaatatgtttattccatatcattcaatttctattaactgcctgcgtctgcatccattatatgatgaatattgtttagccaattctactaatactgaagcggcttttttgatacgataatttttagaccataccgccgcataacgtgcgacgggtaacgtgtcttgtatgggtatcgtgataaattgattagagccaaaaggcgtggtcatatcgcagggaataacagttaagaaatcagcattgagaacaagattatatattgtgacgacggaatctgttttaacaatgttttcgatgctgatgccatttcgttgtagagtggtgagtaattcgctgtagtagcccatattcgtttgcggcaacacccactgttcgtcttttaacgattccagtgtgatggtgccggtgcatgttcgggacttgctggctaccaggacaaactctgattcaaacagcggctcgacatgcagatcctgtagctgcatttcattactgagcgtaccgatagcaaagtccagccgcccgtcgcgcagggccggcagaaatgaagagagctgggcttcgtacatggatacctgcgcttttggaaagacctctttgaacttatgaatcatatcggacatgaaggtaaagccaatcagcgaaggaaagccaaacgagacgtcgacaacggtattgcacgtcatactgttcatctcgttgatcatgtttttcatttcgcgggtgatagattcagaccaggaaagcagtacctgtcccgcttcggtcaacgtaacgccggtatttttacgtacaattagctcaacgccaaaataggcctcaacatcgctaatgattttactgacggcgggttgggttaaccctaacgattttgcggcagaaccgatagaaccacttctaatgacttcctgaaagaccaccaaatgctgtgttttagggagaacaagagtattcatatctaccgctctgaaataacattgtgaacggcaggaagtgtagcaaattaaatcttaaaggttatgtgcgaccactcacaaattaacttaccacaatttttacatggtttttattaaataaagaaaacctgatatttcaataggttacaaaaataaagcagtaacttagcctgatttcaatcaaaaaacaggggcgggataacgatatattatggcgataaccagcctattttatctcctatttttgatatcccatgaagacgatatttcaatcaattacgggacattttatcgacaattccagcgttaaatttaaaacgtaatttctcaaatttaagtataaaccgaaggtaaatgcgcttaaaaaccgttacgcgtcacatttttttaccttatttgtttgcaaagaaacatttaataaaattttaaccaaaatatttcatacatttaattttcatttaaaacaaataatttacaccgctttcttgctgtttttcaggatgtaattttgtgaaagaaatcgattgcttttcacttcaactaaaaatagcgcaatacatagcgttttgtgtttctcatcacaaaaacgaataatattatgtcaccacggctgtcaattaattgccggatggtgacgctggcgtcttctgcaacctctatacccttcaccggcctgataagcaaaaacccgccgaagcggattttatgaagaggtgaaactgaccgataagccgctttctttcgggtatagcgtcgtggacagtcattcatcctgtcgccctgtaaaagcaaaaacccgccagcttacactgacggggtttatgaagagatgaaactgaccgataagccgctttctttcgggtatagcgtcgtggacagtcattcatcctgccgccctgtaaaagcaaaaacccgccagcttacactgacgggttttatgaagaggtgaaactgaccgataagccgctttctttcgggtatagcgtcgtggacagtcattcatcctgccgccctgtaaaagcaaaaacccgccagcttacactgacgggttttatgaagagatgatactgaccgataagccgctttcttttgggtatagcgtcgtggacagtcattcatcctgtcgcccggtaaaagcaaaaacccgccagcttacactgacgggttttatgaagagatgatactgaccgataagccgctttcttttggacatagcgtcgtggacagtcattcatcctgccgccctgtaaaagcaaaaacccgccgaagcgggttttatgaagaggtgaaactgaccgataagccgctttcttttggatatagcgtcgtggacagtcattcatcctgccgccctgtaaaagcaaaaacccgccgaagcgggttttatgaagaagtgaaactgaccgataagccgggttctgtcgtggacagtcattcatctaggccagcaatcgctcactggctcaagcagcctacccgggttcagtacgggccgtaccttatgaacccctatttggccttgctccgggtggagtttaccgtgccacggactgttaccagccgcgcggtgcgctcttaccgcaccctttcacccttacctgatcccacttacgtgggccatcggcggtttgctctctgttgcactggtcgtgggtttcccccccaggcgttacctggcaccctgccctatggagcccggactttcctcccctccgcccgtctccccgaaaggacgacgacgaagcggcgactgtctggtcagcttcggcgcgcagtatagtgggttcgcgcgactttgtcaccctgcgctgcgcattcctatcgccagagcggcagcaacatttctggatgcccgataaatattgtcaaaagcgccccgaaaagcctcctccagcgtcacgatgcgcgtgagtacgctaaagacagcgtcgatgccataatgatgtactatccctacatcgtgcgtcaggctgccggcaatgccaattactggcttatgatattttttcgccacatttgcgacgccaatcggcactttaccgcgaatactttggctatcaatccgcccttctcccgtcaccaccagcgtacagtcgtggatatgctcctccaggttcagtgccgccgtgacaatttcgatcccgctgcgtaattccgcaccgagaaaagccattaacgccgcccccataccgcctgccgcgcctgcgccgggtgccgtctttacgtcgacattcagcgatttttttatgatgtcggcatagtgagcaagatttctgtccagctcaacaatgttctcttcggtcgcgcctttctgcggcccaaaaattcgtgatgcgccgttgtcgccgatcagaggattagagacatcgcaagcgacacgaatcgcgcagagttttaaacggggatcgagctctgaaatatcaatgtcgcttagacaatgaaggcttccgccaccgtaaccgatatccgcgccgtttgcatcgcgcagttttgcgcctaacgcctgcatcatccctgcgccgccgtcatttgtcgcgctgccgccaatgccgataatgatattgcttgcgccgctttccagcgcctgcaatatcagctcccccgttccccgcgaggttgtaatcaaagggttgcgtttttctggcggaaccagcgccagtccgctggccgccgccatttcaataaacgcggttttaccatccccggacattccccagcaggctttcactttttcacccaacggcccggtcacccatgcggcgcgttcaacgccctgcgtcgcggcaatcatggcttcgaccgttccttcgccgccatcggcaaccggaacagagacatattgcgcatcggggaaaatttcccgaaatcctttttctatcgcctgcgctacctcggcggcagaaaggctttctttataggagtcgggggcaattacgattttcatagtggtagcctgttactgcacaacgccggatggcgtttcacttatccagtctgaaattcaggcccggatcgctacacgccatccgggcacaacgtcgttagcgagtgacttccactttcgccagtttttcgtagtagcacgccagcgcgctatggtcgtcattaccgtgtccatccgcgcgtaacgcctgcatcatttccataacggcggcggtcagcgggagctgcgcgccaacgccgtgggaggtatccagcgcattcgccagatctttaatgtgcagatcgatacggaaacctggcttaaagtttcggtccatgaccatcggcgctttcgcatccagtaccgtgctgccagccagaccgccgcgaatcgcctgatagaccagatccgggttgacgcccgctttagtcgccagcgtcagcgcttcagacatggcggcgatattcaacgccacgatcacctggttagccagttttgtgacgttgcctgcgccgatatcgccggtatgcaccacggaacccgccatcgctttcatcaggtcgtagtacttgtcgaaaatggctttatcgccccccaccatcaccgacagcgtgccatcaatcgccttcggctcgccgccgctgaccggcgcatccaacatctcaacgcccttcgccttcagcgcatcgctgatttcacggcttgccagcggcgcgatagaactcatatcaatcaatacggttcctggcttcgcgccttcgatgataccgttctcgcccagcgcaacctctttcacatgcggagagttaggcagcatcgtgatgatgacgtcacactgttcagcgatcgccttcgccgtagaggccgtttccgcgcctgcggcaatgacgtcagcaatcgcttcaggattacgatcggacaccaccagcgaataccctgcttttagtaagtttttgctcatgggcttacccatgatgcctaagccaataaagccaactttcatcgtcatagcgttctctctttccataccaggattattttttaaaggtgtcggcaagcttctgcgtgctggcgcggaatgcgcctaaatcgctgccaacggcgacaaaggtcgcgccccattccagataacggcgggcatccgcctctaccggcgccagaatgccgcacggtttaccgtgcgctttagcgcgggcgaaaatatgttgaatcgtctgctgcacgtcagggtgagaagcattgccgagatgacccagcgcggcggccaaatcgcttgggccgacaaaaatgccatcaacgccttccgttgcggcgatggcatcaacattgtcgacacccaactggctttcgatttgaacaataatggtgatgtttttgttcgactgcgcaaagtaatcaggcaccgtaccgaacatattcgcgcggtgagaaacggagacgccgcgaatgccttccggcgggtaacgcgtcgaggcgacggcgcgagccgcttcctcttgcgtttcaacaaaggggatcaggaagttataaaacccaatatccagcatccgtttgataatgaccggttcattggttggcacacgtaccacaggcgcgctggcgctgcctttcaatgccattagctgcggaattaaggtggtcacatcgttcggcgcatgttcgccatccagcaccagccagtcaaatcccgccagaccgagaacttcggtggtgattgggcttgccagtgcagaccagcagccaatctgcacctgttgcgccgctagcgccgctttaaacttattcgggaaaatagcgttattcatcgcttataccttcgcttatttctttaattctctacatgtgatgccgccaccataacttatagcaacgacaataaaatgcttatctgaaatcagaatgggtctccgcattctatttctaatgtggtacacatcctgtagcacaatataccgttctgatatctttatcgtcttttattattatcatggtattttcaaataactcgtcagatacactgaattcgccattcagtataaacagcctatggcggataatcattgtgcaaacgctcattaaaaagggattatttaacgcttatttttgagcatacgcccatgatactgggcgctaatgcacacatttacgctttacccggcctacataaaaaatttcataatttgcggtgatctggatcacattcttatatttatactcctgtcattcttatttcattatgcatgaactttatttcttatattgagatttaacgatttaaccataaccaaaatagataatcctatttctatcatccaggctggagaatgttgaacaatggccaatatcgaaattcgccaggaatcgccatcggcgttttatataaaagtacatgaaaccgataatgtcgcaattattgttaatgaccacggtcttaaagccggaacacgttttccggatggcctggaactgactgaacatattccgcaaggccataaagttgctctgacggatatccccgctcacggcgaaatcatccgttatggcgaagtcatcggttatgcggtacgcgacatcccgcgcggaagctggatcgacgagtcgctggttgaactgccaaaagcgccgccgctgaatacgctaccgctggcgaccaaagtaccggaaccgctgccgccgctggaaggctatacgtttgagggctatcgtaacgccgatggcagcgtcggcaccaaaaatctgcttggcattaccaccagcgtgcactgtgtggcgggcgtggtcgattatgtggtgaaagtgattgagcgcgatctcctgcccaaatacccgaatgtcgatggcgttgtagggctaaaccatctgtacggctgcggcgtggcaatcaacgcgccggcggcggtcgtgccgattcgcacgattcataatatcgcgctcaaccccaattttggcggcgaagtgatggtgattggcctcggttgcgaaaaactgcagccggaacggctgctggaaggcaccgaggatgttcccgccatcgccgttgaaagcgccagtattgtgcgtttacaggacgagcagcatgtcggctttaaatcaatggtcgacgatattttgcgggtcgccgaacgccatctgacgaaactgaaccagcgccagcgcgaaacctgcccggcctccgagctggtcgtcgggatgcaatgcggcggcagcgatgcgttttctggcgtcacggcaaacccggcggtgggttatgcttccgatctgctggtacgctgcggcgcgaccgtcatgttctcggaggtcaccgaagtgcgcgatgccattcatcttctgacgccgcgcgccatcaacgaagccgtgggtaaacgcctactggatgaaatggcctggtacgataactaccttgatatggggaaaaccgatcgcagcgctaacccgtcccccggcaacaaaaaaggcggcctggcgaacgtcgtggaaaaagcgctgggctctatcgctaaatcgggtaagagcgccattgtcgaagtattgtcgccgggccagcgccccaccaaacgcggcctgatttacgccgcgacgcccgccagcgatttcgtctgcggcacgcagcaggtcgcttccggcattaccgtacaggtctttaccaccggacgcggcacgccgtacgggctgatggcggtgccggtcattaaaatggcgacgcgtaccgagctggcgaaccgctggtatgacttaatggatatcaatgcaggcaccatcgccacgggtgaagagacaatcgaagatgtgggctggaagctatttcactttattctcgatgtcgccagcggccggaaaaagactttctcagatcaatggggattgcataaccagctggcagtgtttaaccccgcacctgtgacctgatctattctggaaagcgcctcgcaaaacatggcttaagggccatgttttcatatgtttgataaactgcgccatgttcataccggatatggcaaaaacacctaacccaccataaaaccattcaaattcaataaattgaaattctatgccaagcgcaaccttacgtttctcactaatttgagtcgcagcacatgcaatttgaggtatgtcgaatataacgacagcctattaatcacctttacttaattctgctgcctcatcaattctttaatttgtgccagcgtggacgtgccttccatcggcccacgcgcagagatagccagcgatcctgcggcattagcatgggctaaagcatcgggtacggaatatcccgcaagaaacaggctgacaaaggttgcgccaaagcaatcgccagcgcctgtaggatcaaccaccttcaccggatacccagccacatgatgttgttcgtcttttgaatagtaactggctccacgggcgccacgtttaatgatgacatgggcaattccacgcttgtgaagccttgcgacaattttctcttcatcgcgggatttgctcaggccgaaataatccagttcgccatcgcttggcaggaagaaatccgtgtaatcaagaatatattcaaaggcctgcgacatttcgcggatctttagcatctctttacggatattaggatcgaaagaaattgtgccaccattttcttttacaatgctaatcgccttgcgtacggcatcgatcaaacgaaaggaaaataatgacgatcccataatatgaaagtggcgatattgcctgagtaatgtttcatcaaggtggtcggcactcagcaaaccgcacgcactgtccggcatgttgaaaataaaatctcgctgggcctggcttcggtagctgacaaaagcactacctgttgtggcgttcggcagtacggaaattccctgtacatttacgccatcgcgcgacaatcgggtaatattcataacgccaaaggcatcgttgccaacacagctaaacaacaatgaacgaaaaccaagtttagcaacctgatcggcaaatatggcaggcgccccactgggatacggcccccaaaattcccccggtgaggaaaatccctggttctctttttttgccagaaactcgacgagcaattcacccaatgttgcgattgttatgttcatgcgttgtccttcatcttgcctgatgcagggtcgggtttatccaggtcagacattcgttattggtatagctgttggttaagccgtcggccagaaaccgtgagtggtactcagcggcgacaatctgtggcgtaataatcgcgctcagcgtattcagttttcctaccggataacgcgccacatcatgaatcggacgctgcgccaccacggcaatactctgtccactaaggcgcaggcattcacttagcaaagcagctgcactttcgtttttcacgttgagcgtgccatcctcgctgatatggtccaccatcaccagacaacatgacggttgaaattgttgcaaagattggatggcgatttcgccccccaacgcctgaccactatgccccagtacaccgcccaacaacacaatttcaccatcgatataatcacgggccggtgcaacatggctaagatcgttgatgataaggcacagatcccgataatcgcccaggaaaggaagcgctttacgcaacacctctccggcccccagaaacacggtatcgtcgtcgcagaccagacgggcaacttgcttagccagttcaagctctacgctatgctctaacgcctgcgactgcaccacttcatggcttaccgctgctctgacgggttgggccgtgtaaatcgctccgccaaaggagcgtttcagatagccttgctgctccaggtaattgagatcattacggatcgttacccctgaaaccgataacatttcagccaaatcgtctacttttatttcgccgtttttacggacgatttcggcaatgtccagacgccttttcaacaggctggtagatggttttgccacaacataccctttttttccgcttcgtcgggaagttatcccgtgctttaactttcatttttaaacttctgacaggggatgtcaattttgcaccacgtcaccgaatgctcaatggaaaacatcacaataaaatcaagtaattatagaattttcatatcttccatttacttacaaaacaaaatttaaatccacactttttctttcatttaagaaaaattatcctgcttttgtgttgatgatcacaatcatgtgtggcaatgatcgttacattactttcaaaacgaaggttatttttattttaaactttaatttcgaaagttataaacggagaccactatgttcattatttccagtaaaaatatgctccagaaggcccagcatgcaggctatgccgtgccagcctttaacatccataacctggaaaccttgcaggtggtggtagaaaccgccgcagaaatgcgctcaccgctgatcgttgccggaacaccaggcacgtttagctatgccggaatgggtaacattgtggcgatcgcgggcgatctggctcgtgaatacaatctgccactggccattcatctggatcatcatgaatcgttagccgatattgaaagcaaagttatggcagggatccgttcagtcatgatcgatggttcccactttccctttgaagagaatgtggcgctggtgaaaagcgtggtcgatttttgccatcgctacgacaccagcgtggaggcagaactgggccgccttggtgggatcgaagatgatttagtggtagacagcaaagatgccctttacaccaatccacagcaagcacgtgagtttgtggcgcgcaccggcattgattcgctggcggttgctatcggcacggcacacggcatgtatgccgctgaacctaaacttgattttgagcgactggcagaaatacgcgctctggtggatatccctctggtattgcatggggcatctggtttgccggaaagcgatattcgccaggccatcagccttggggtatgcaaagtcaatgttgccaccgaactgaaaatcgccttctccgacgccttaaaagagtatttcctacaaaacccgaaagccaatgatccccgccactatatgcaaccagcaaaacaggcgatgaaagaggtggtacgcaaagtaattcatgtttgcggctgtgaagggcaactgtgaggaatcgcctgtgatctacacgctaacacttaatagcgcgattgatatgaatatatttagcgatcctttacagccaaatattgtcaatcgcactcaccacaccgagttttgcccaaatggtaaaggggtaaatgttgcgctggttctggatcactttcaaatacctgcgcatatattaggcatttttggtggtttcaccgggcattatattgtagaaagcctgcgtacccgaaaaatgccagtcacaccagcatgggtagaagaacccacgcggattaatattttcattcatgacggtaagcaggaatataaactggtcaaccctggctcatatattccagatgaatgtaaacaacaaattatcacgattatttcgcaactgcccgatgcagactatctggtgataagcggcagcctgccacaaggtattgaaagccgcttttacgcagaaatcatgcatatttgtcagcaaaaaaatatcggcgtaattttagatattagtcatccgtcattacgtcagttactggagttcaaaccgttattaattaaaccaaatgatgaagaggttaaagcaatattcggtttaactgtctctgacgacaatgatgcgaaaaatactctaaccactttacatgcacttggtgcacaaaatgttctgctaacccttggcgctaaaggaatgtatttctccaatgggattgattactggttttgtagcgcgccaacggttgatttggtgagctccgcctgtgcaggcgatgctgcactggccgcctttctcagccagtggttatctacaggagaagtggaatatgccttatctcttgccagtgcaacaggagctgatgtcgcaagttctgccggactaggccaacttgcggcaatagaaaccttactttcgcaaatccacgtcagaaagctgtaggttaaattacaatataaggtctgcttatgaaaaagatcattgcagtgaccggctgccctaccggtattgcgcatacatttatggctgaagaagccttaaaaaatgccgcgaaaaaattatctgttgaaataaaagttgaaaccaatggtgccagtggcgttgaaaatgctattcaacctgctgatctggtagatattgccggagtcattattgcggcggataaagatgtcttacctgatcgctttaatggtttaccggttattgaagtaccggtaaaagaagcaatccatcatcctgcggagctgattaacaaagttattaatggtgaagccccaatacgtaaaggcgaatcaaccaccagcacggaaattatcgaaaaagaatcactggggcgacaaatttataagcacctgatgagtggtgtttcaaatatgctaccttttgtagttgccggaggcatattaattgcggtgtcgtttttatgggggatttattccgctgatcctaattcagctgaatacaatgcaaccgccgcaatgctaatgaaaatcggtcagcaagccttttcgattatggttccggtctttaccgcttatattgcattctctatttctggcagaccagggatggtggctggatttgtcggcggcttactggcaaatgctaccggcgcaggatttcttggtgggataattgccggattcgccgtcattgccattatctatctggccggcgtactgctgacctggcgtcgcgcccgacagtttgtcgcggctgagaaagccacggcgctacagcaaagtcaaatcgcctcttaattttaggggagcaatcgctcccctcaccttcctggagaatgttatgaaatcagtggttattcacgctgagggagacgtgcgcgttgaagaacgtcccttaccacaactgcaagccgaggacgatgtgttggtcaaggtcgttagctcagggctttgcgggtcggatatcccgcgtattttcgcgcagggcgcccattattatcctattacgttaggtcatgaattcagcggctacgttgaatcctacggcacaggcgtaacggatatgcagcccggcgatgccgtcgcttgtgtcccgcttcttccctgctttcactgtccgcaatgcgaacgcggttacttttctttatgcaaacagtatcagtttgtaggatcgcgcagcgaaggcggtaatgcggaatatgtggtggtcaaacgggccaatcttttccgcttgccttctgatatgccgattgaagatggcgcgtttatcgaaccgattaccgtgggcttacacgcctttcatctggcgcagggctgcgaggggaaaaacgtaattatcgtcggtgccgggacaattggcctgctggccttacagtgcgcgcgggaactgggcgcgcgaagcgtaacggcgattgatatcaatccgcagaaactggaactggcgaaagcgctcggcgcaacgcatacctgtaatagccgggaaatgaccgccgacgacatccagaccgcgttgtccgacattcagtttgatcaactggttctcgaaacggcaggaactccccagaccgtctcgctggctatcgatatcgccgggccgcgcgcgcaactggcgctggtggggacgttacatcacgatctcaccctgacaacgcgtacattcgggctaattttgcgtaaagagctcacgctcctcggcagttggatgaactactccgcgccatggccaggagaagaatgggaaaccgcagcgcgcctgttggctgaaaaacgtcttcaactgacccctctcattgcccatcgcggcgatgcggaaagctttgcagaagcagtcaaagcgcttaatggcgcgcccatgcagggcaaaattttacttcaactttcctgatggtacgagccagcaacctgcgctggctcacatttcctttcgaaatttagcgttcacctttcgcaatccttcgtttaaactagttacagttaattatcaggcaaatcaatatgaactcatttgagcgaagaaataaaattgtcgacctgattaatacgcaaggcagcgtgctggtgatggacctttcaaatacctttggtatttctgaagtgactatccgtgctgacctgcgtctgctggaagagaaaggccttgtcacccgttttcatggcggcgcggcaaaaccgggaagtcatctggcggaaggcgacaatcaggaagtcattctggaagatcggtatcaactcgccagcgatccgaaaaagcggattgcccaggcggctgcggcaatggttgaagaaggaatgaccatcattctggatagcgggagcacaacattactgattgcggaagcgctcgcgcgaaaaagcaatattacggtgatcactaacagcttgcctgccgcttttacgctatcagaaaataaagatctcacgctggtggtctgcggcggtacggtacggcataaaacccactcaatgcacggcacgattgcggaacgatcgctacacggcatcagcgccgatttaatgtttgtcggggcggatggcattgatgcgacaaacggtattaccacgtttaacgaaggttattccattagcggcgtcatggcggcggcggcacacaaagttatcgcggtactggacgcgaccaaatttaaccgtcgcggctttaaccaggtattgccgatggacaagatcgactgtgtgataaccgatgacaccatcagcaaacaggataaagcggcattagcgaaaacaggcgtggaattaatgatcgtctaaaaaggagtcggttatgcgttgctgatcgcgagagtaagcccgaaggaaaggtccggcccgctatcaccgcccaatgcccccatcaatttacccacatcaatcacctgattgagtattaacacgatggcgataaaaggcggttcccgggcgctcgcttttattcttcctgctgctccagcgcatacttatacagcgcatttttcttcacgccgtgaatttctgctgccagcgccgccgcttttttcagcggcagttctgcctgtagcagcgccagcgtgcgcagcgcgtcggcgggcaggtcgtcttcttgcgctttatggccttcgacaatcagcaccatttcgcctttgcgacggttttcatcttctttgacccacgccagcagctcgccgaccggcgcgccgtgaatggtttcccaggttttggtcagctcacgcgccagcaccacataacgggattctcccaataccgcgacgatatcttccaggctatctaacaggcggtgggttgactcataaaaaatcagcgttcgcggttccgtttcaatggcttttagcgcatcacggcggcctttggatttcgccggtaaaaagccttcatagcagaaacggtcggatggcaggccagcggcgctcagggcggcaatcgccgcacacggccccggtagcggcaccacgcgaatccccgcttcgcgacaagtacgcaccaggtggtagcccggatcgttaatcagcggcgtaccggcgtcggaaaccagcgcaatgttctgcccttcttttagcttcgcgaccagcgtttccgctttttgttgttcgttatggtcgtgcagcgcgaacaaccgggcattaatcccaaaatgttgcagcaataaaccggtgtgacgagtatcttcggcggcaatcagatctacagcctgtaacacctccaacgcacgctgggtaatatccgccagattaccgataggagtaggtacaataaagagttggccctgagaattatccgccgattcgttttgtttcattgtgtcgtccgtattgccgatttaatattgagcattgcgtaaaaaaatatcactggatacagtatggtaccctcaacattttctcgtttgaacgccgcacgcgcgctgcctgtcgtcctggctgcgctacttttcgccgggtgcggcacccaggcgccagatcaaagcgcagcctatatgcagggttcagcgcaagctgactccgccttttacctgcatcagatgcagcaaagcgcagatgatagcaagaccaactggcaattactcgccattcatgcactgctgaaagaaggaaaaagccagcaggccgtcgacctgttcaaccaactcccgcaaaatctgaacgatacccagcgtcgcgaacagtctttattagcggtagaaatcaaactggcgcaaaaagatgtcgcaggcgcgcaggccttgctggataaactaaaacccgccgactttgcgccaaatcaacaagcgcgttactggcaggcgcagatcgttgccagccagggacgcccgtcgcttaccctgttgcgggcgttaatcgcccaggaaccgctactggcggcgaaagataaacaaaaaaatatcgacgccacctggcaggcgctctccgccatgacgccggatcaggccaggacgttagttatcaacgctgatgaaaatgtgcttcagggctggctggatctgcaacgcgtctggtttgacaaccgcaacgatccagacatgctgaaagctgggatcgccgactggcaaaaacgctacccgcaaaatccgggggcgaaaatgctgccgacgcagctcgtcaatgtacaacgtttcaaaccggcttccaccagcaaaatcgctctgctgctgccgctgaacggtcaggctgccgtgtttggccgtaccatccagcaaggtttcgaagccgcgaaaaacctcggcacccaggcggtggagatgcagcctgccgccgctcctgacgcgccggtcgaacctggcgtggaggagacgcaaccacaaatgaccaacggcgtcgccagtccgtcgcaggcctcggtgagcgatctgactgatgacgctccagcccagtccgctacgccagtcagcgcgccacaaactccccctgctacagcaagcgcgccggcggatccctccgctgaattaaaaatctacgatacctcttcccagccgttggatcaggtgcttgctcaggttcagcaagacggcgccagtatcgtggtcgggccgctgttgaaaaacaatgtggaagcgctgatgaaaagcaacacgccgctcaacgtgctggcgctcaaccagccggaaacggtacgtagcttccctaatatctgctatttcgcgctctctccagaagatgaagcccgtgacgcggcgcatcatatttatgaccagggcaagcagtcgccgctgctgttgattccacgcagcgcgcttggcgatcgcgtggcgaacgccttcacccaggagtggcaaaaactgggcggcggcatcgtgttacagcaaaaattcggctccgtagccgagctgaaaatgggcgtgaacggcggcgcgggtatcgcgttgactggcagtccagtcgccgccagcgtgcctgcgcagcctggcgtcaccattggcggtctgaccatccctgcgccgccgaccgacgcgcaaatcaccggcggcggacgcgtagacgcggtctatattctggctacgccggaagagattggctttatcaaaccgatgatcgccatgcgtaacggcacccagagcggcgcgacgctgtatgccagctctcgcagcgcgcaaggcacctccggccccgacttccgtctggaaatggagggtttacaatacagtgaaattcctatgctggcaggcggcaatatgccgttgatgcagcaggcgctgagcgctgtacataacgactattctctggcgcggatgtacgccatgggcgtggatgcctggacgctggcgaaccacttttcgcagatgcgtcaggtgcaggggtttgagatcaatggcaataccggcgcattaaccgccagcccggattgtgtgattaacaggaagttatcatggctcaaataccagcaaggggagattgttcccgccagctaacgcgtaaacaggctggcgacgcgtgggaagctgccgcgcgtcgctggctggaaagcaaaggactgcggtttatcgccgccaacgtgcgcgagcgcggcggcgaaatcgatctgatcatgcgcgacggaaaaacgacggtttttgttgaggtccgctatcggcgctccgggctttatggcggcgcggcggctagtgtgacccgcagcaagcaacacaaattattacatactgcccgcttgtggctcgcccgccagaatgggagttttgatactgtggattgtcggttcgatgtgttagccttcaccggaaatgagattgagtggtttcgggatgcgtttaacgaccactcataattgaagattttaaggattagcgtgctcgaaagaatcaaagtttgctttacagaaagcattcaaactcaaattgctgcggcggaagcgcttccggatgccatttcccgcgccgccatgacgctggttcattccctgcttaacggcaacaaaatcctctgttgtggaaacgggacgtccgcggccaacgcacagcattttgctgccagcatgattaaccgctttgaaacggagcgacccagtttacccgccattgcactaaataccgataatgtggtcttaactgcgatcgctaacgatcgcttgcacgatgaagtttatgcaaaacaagtccgggcgctgggacatgcaggcgatgttttattggcgatctctacgcgtggtaatagtcgcgatatcgtaaaagccgttgaagcagccgtcacacgtgacatgaccattgtggcgctaaccgggtatgacgggggtgagctggccggactattagggccgcaggatgtcgaaattcgtatcccttcacaccacagcgcgcgcattcaggaaatgcatatgctgacggtaaactgcctgtgcgatttgatcgataacacgctttttcctcaccaggatgattaaggagtacacatgaaggcattttcgccgctcgcagtccttatttctgcgttgctattgcaaggttgcgtcgccgccgcggtagtgggtacggcagccgtcggtaccaaagccgcaaccgacccgcgtagcgtgggcacccaggtggatgacggaacgctggaactgcgtgtcagcagcgcgctgtcgaaagatgagcaaatcaaaaaagagacgcgcatcaatgtcacggcttatcagggcaaagttttgttagtgggccagtcgccaaacagcgaactctccgcacgcgctaaacagatagcgatgggcgttgaaggcaccaccgaggtctataacgagattcgccagggtcagcctatcggcctggggaccgcctctaacgatacctggatcaccacgaaagttcgctcacagctactgaccagcgatcaggtaaaatcgtcaaacgtgaaagtcaccaccgagaatggcgaagtgttcctgctgggcctggtgactgaacgtgaaggtaaagcggcagcagacatcgccagccgggtgagcggcgtgaaacgcgtgaccaccgcctttacgtatattaagtaaccggtgtgccgggtggcgataagaatgtgtaaaccgcgtcgccatccggtaaatcatccggcttcgctactccgctttttcccgcagttgcgatgaggtcagaatcgtcacgccttcttgtgctggcgccagcgcttccgccagcatggcccgcgccacatcccgcgcatcgatcgatttccagtttcctggcaacagccggaatagcggagcgaaaagcgtttcattcacccgccgcgttgttctgtcgccgagcagcatagaaggtcgggcaatcgtcaaacgaggccaattttgcgcgattaacgcctcctccatttctcctttcacccgattgtagaaaaacggagagtgcgcgtttgctcccattgcgctgaccaccaccatgtgctgcgcacccagtcgacgtccggtcagcgcagtatcaaccaccagcgtataatccgcatgaataaacgccgctttacttcccgcttcacgccgggtcgtgcccaggcagcaaaaaacaatatctaccgggtcggtcacctgagctaacgcatcggtaagctgcggatcgtgagggttataaacgccgacaatatccgtcagcgggcgacgcgtcggcgcggcgatagcgctcacctgcggcgtgttgattaacattctcagcagatgtccgccgaccagtccggtcgcgccggtaatcagtacctgactcatcctcgctcctttacagatttgtccaccttgcactctcggccctatcgaccaggcttaatagtctacgaggtaagtatccatcattgtggaaaatttgccttacccgacgccaccactgcggaggaaacgcatgagtaagaaaattgccgttttgattaccgatgaatttgaagattcagaatttacctcgccggcagcagaattccgtcaggccggccatgaggtcatcaccatcgaaaaagaggcgggtaaaacggtgaaaggaaaaaaaggcgaggccagcgtcaccattgataaggctattgatgacgttcgtcccgacgagttcgacgccttgctattgccgggaggtcattcgccggactacctgcgcggcgacagccgtttcgtggattttacccgcgatttcgttaacagcggtaaaccggtttttgccatttgccacggcccgcagttgttgatcagcgccgatgtcattcgtggccgcaaactcacggcggtgaaaccgattattatcgatgtgaagaacgcgggcgcggaattttacgatcaggaagtcgtcgtcgataaagatcagctggtgaccagccgcacgcctgacgacctgccggcatttaaccgcgaggcgctacgcctgctgggcgcgtgagtcacgtaaccagtgcagttttttaccaaaccccagcgtgttgtcggtgaatttaatttcatccagccggatttcccataccggcgctggcagcaccctggcgaccgggaagcgacgaaggtaagctttacgcgcggcgtcgctctcctgcccctccagacggcgaatttcccctttaaactgcacgccgcgaatgcgcgccaccgttttcggctgcccattgaccgttcccgcaactggcgcgcacgcgccggacatttgcgcatggcgggttttatcatccgttaacagatacagtgcgacgttttgcgcatcgaacaaataaaacgcattggcgcaccacagctctccctcatggtgtacgcaccaggtcaccacgtgttgtttcgccagccaacggccaatagcggtaagtgtgtccatctttattctcgcttatactgggaacctgaaaattatcatgctgatggcgacaatgaccccctggtatctgtatctgattcgtactgcagacaatgcgctttacaccggaataaccaccgatgtggcgcgtcgttacaggcagcatcaaacgggaaaaggcgcaaaagcattacggggaaaaggcgagttaacgctggcgtttgcggcgcaggtcggcgatcgctcgctggccctgcgcatagagtatcgcatcaaacagctcacaaagcgccagaaagagcgccttgtgacggaacgcgaagcgtttgaggcgctgctgtccagcctgcaaacgccggtgcttaaaaacgattgaagtggtcgtgatactccaccagccccgtcacgccctccagcgcatcctcagccaaacggtgtacctggaaagcgctttccgtaccgggccaacggcagtgaagatcgtaatgtgcggccagttcaaaaccgaagcggctatataacgccggatcgcccagcgtcacgaccgccgcgtagccgaactcgttgagcgaatccagcccttcatacactaactggcgcgccagcccttgcccgcgatacttttcatcgaccgccagcggcgccatgccgacccactgtaaatcttcgccctgcacatcaaccgggctaaaggcgacatagcccaccacctgaccttcatcatccgtggccaccagtccgagcgtcagaaaaccatcttcacgcaaatcgtgaaccagcttcgcttccgcatcgctttcgaatgaacggcgtaacagcgcatcaataccaggcgcatcaataggaatttctactcgaattagcatggttcacctaccgaggtctgtttggtttccggcgagtttttcattcccgcctcaacaaaatccgccagttgcagcagcataacgcgtaacgctttcggcatctgctccagttcgatggcgtccatcagattcttcacatacaaccctaactcagtatcgccttcaatgaccagtcgacgctggaaaaagagcgtatccggatcctgtttacgggcggcgatcattagcagatcgctggcgtcggcgctaaaactgacgtcagcatccgcctgctggctaacgatcagcttttcattttcaaccgtggtataccattttaagtcgatgtcacgaacatgaatgcttaaccaacgaccttcgaggaattccagctctccatcggccagcgcctgacgaaactgccagctcagaacctgttccagaacctggcgctttagcgcaaagggcgtcagtttaaccggtacactcatcagagacgggccagcatggactaagcgtgaacgcagtttatctaacacgagctttactccctgtttcaatagtcctgttattttgccatatccaataaatcacatggcggcgtaaatcaacaattgggtctgattttctaccccattattggtgttaccaatacgcctttaactgccttaaatcaaaaattgtcgcagcaaggttaactaaaatccctgttcgttaacaattttgcgtctcagacgtaaccctcaggataaattatggagctgctctgccctgccggaaatctcccggcgctgaaggcggccatcgaaaacggcgctgacgccgtttatatcgggttaaaagacgataccaatgcccgtcattttgccggccttaactttaccgaaaaaaaattgcaggaagcggtgagttttgttcaccagcatcgccgcaaattacacatcgccattaatacttttgcgcatccggacggctatgcccgctggcagcgcgccgtggatatggcggcgcagcttggcgccgacgcgttgattctcgccgacctcgctatgctggaatatgccgcagagcgttacccgcatattgagcgccatgtttccgttcaggcctcggcaaccaacgaagaggcgattcgcttttatcaccgcaactttgatgtccaccgtgtagtactgccgcgtgtactgtcgattcaccaggtaaaacaactagcccgcgtcacgccggtgccgctggaggtattcgcgtttggcagcctgtgcattatggcggaaggtcgctgctatctttcttcctacctgacgggggagtcgcccaataccgtcggcgcctgctcgcccgcccgctttgtccgttggcagcaaacgccgcaggggctggaatcgcgcctgaatgatgtcctgattgaccgttaccaggatggcgaaaacgcgggctacccaacgctgtgcaaaggccgctatttagtggacggcgagcgctatcacgcgctggaggagccaaccagcctgaacacgctggaactgctgccggagctcatggcggcgaacatcgcttcggtgaagatcgaaggccgccagcgcagcccggcctatgtcagccaggtggcgaaagtgtggcgccaggcgatcgatcgctgcaaagccgccccgcaaaacttcgttccacagcgcgactggatggagacgctcggcgcgatgtccgaaggcacccaaaccacgcttggcgcatatcaccgtaaatggcagtgagaggagctatgaaatattccttaggaccggtgctttattactggccgaaagagacgctggaagatttttatcagcaggccgcaaaaagcagcgctgatgtcatttatctgggcgaagcggtgtgcagcaagcgtcgcgcgaccaaagtcggcgactggctggaaatggcgaaatccctcgccgccagcggtaagcaggtggtgctctccaccctggcgctggtacaggcgtcatctgaattaagcgagctgaaacgctatgtggacaacggcgattttctgctggaagccagcgatcttggcgtggtgaatctgtgcgccgagcgcaaactgccgtttgtcgccggccatgcgctgaactgctacaacgcggtcacgctgcgccggttgctgaaagaaggcatggtacgctggtgtatgccggtggagctgtcccgcgactggctggtgaatttgcttaatcagtgcgatgaactgggcatccgcaatcagtttgaagtggaagtgttgagctacgggcatctgccgctggcctactccgctcgctgctttaccgcccgttcggaagaccgcccgaaagatgagtgcgaaacctgctgtatcaagtatccaaacggtcgtgacgtgctctcgcaagagaatcagcaggtgtttgtgcttaacggtattcagaccatgagcggctatgtctataaccttggcaacgaactgacgtcgatgcagggattggtcgatatcgtgcggctgtcgccgttggggacggagacatttgccatgcttgatgcctttcgcgctaacgaaaacggcggcgcgccattaccgcttgccgcgcatagcgactgtaacggctactggaagcggctggcaggtctggagctacaggcctagccggatggcggcataaataccttgtccggcctacaaatagcgatcccgtaggcccgataagcgcagcgccatcgggcattgtttttgccgtcagtctcataaagctcactttgttaacaacattcgctaatctttaatgcagtattaaaagattaaccggtaacaaagtgagccgttatgactgacaaaactattccgttctcggtgctggatctggcgccgatccctgaaggatcttcggcaaaagaagccttcacgcactcgctggatctcgcacggctggctgaaaagcgcggttatcaccgctactggctggcagaacatcacaacatgaccggtatcgccagcgcggcgacctcggtattgattggttatctggcagccaataccacaacattacatcttggctccggcggcgtgatgctgcctaaccattcaccgctggtgattgccgagcagttcggcacgctgaatacgctctacccgggacgtatcgacttagggttgggacgcgcgccgggtagcgatcagccgacgatgcgcgcgctgcgtcgccatatgagcggcgatatcgataactttccacgcgatgtcgcagagctggtggactggttcgacgctcgcgaccctaatccgcatgtgcgcccggtgcccggctacggcgagcagatcccggtctggctgttgggatccagcctgtatagtgcgcaactggcggcccagcttggcctgccgttcgcctttgcttcgcatttcgcgccggatatgttgttccaggcgctgcatctgtaccgtacccagttcaaaccttcagcgcggctggaaaaaccgtacgcgatggtgtgtatcaatattatcgccgccgacagcaaccgcgacgccgaattcctgtttacctccatgcagcaggctttcgtgaagctacgccgtggggaaaccggccaactgccgccgccgattgagaatatggagaccttccggtcgccatccgagcagtatggcgtgcagcaggcgctgagtatgtcgctggtcggtgataaagcgaaagtccgccacgggctggaatccatcctgcgggagacccaggcggatgaaattatggtaaacgggcagattttcgaccaccaggcacgcctgcattcgtttgatttagcgatggatgttaaggaagagttgttgggctgattttataacgccgattttcaacggtgatggttggcaatcggcgatttttttcgaagtaatcatagccgggcttcaacatacgccagaaattatattccggccatgcttgcgcctggcgcatattttcgtcattcatcgtaaatgggaagatatggacaggcacgctcttctgcccgctgtttagcgcctgcgccaccagttgataaatctcttcaataccggcatcggtcatggcatagcaaccggccgaaacgcagttcccgtgaaccataatgaaatcaccggtgtagccatttgcccgatcgtaagcattcgggtagccaatattaaatgccagatgatagcggctgtttgggttaagcaaccctttgttggtggcataaaagccttccgggcttttaccgtctccctgtttatgttttggccctaagccaccagaccatgcgcatatagtccaggttttgtagagtttgtaaggcttgttattggcgcttgcccacagttccagcttatcttccgctttcagaatgcggataaataactggtcgccggggtgaatgatttttaaagacgatgcgacaggtttttccactggcaggtaaacgtcttcatcgtacggagtgagccagaaaaattttaaaataaaagcgataaacaggctcaataatacaatagcgagtagtcctttacgccccattttcgtattccgcttattctgaaccagttcaagtatatattttcctatgatatgaaatagaggaaaggtccagttctgtacttttataaaatagtaatcgttttatcatggccgaacagggatatgaataaatcgacttattaccagagaaaatcatcatgagtgaacctgcttccttttttcttcatgcacatattaccgagagtaacctcaagaaatttttccattcaccggcaacaaatattaaagactatgacgactggttgccatggtttactgaggagcaaaggttgtacggcgatcctgcaaaaatgcttaacaatcttgccacatgtaattctggtgaaagtgaaaagaatatttatgctgaacatatcaactttaataaagaaacacagatagtcacgatggatcacatatttctctcagagagctatgaaatcttcatgccactcatggcctgtgtgcggggaatcgagaaatttattacgccaggggaaaataattttgcgctaatttattattactggtggggttcggagatcgccatcgcgctcgaatttgacgccaatggtagcagaataacggcaaatcctaaggcagaaaatttaactatcgccgatgcttttttcgatgaacacggggaagcactcgccgaagaactttataataaacagggttttatttgataccatttcgcggacttgtgaaatattgccggatgaaaacagctcatccggctcgttcaattactggtacaccggcaacaaattaaagctcgataaaatatgcaccagtgcgttcccgacgccaaatagcagaatcagtacaatcatcggtttaccgccccagacgcggaatttcgggctgccgaaacgttcgcgagatttacgtgccaacagcgcaggcacaatggccgcccagatagttgcagctaaacctgcatagccaatggcgtacagaaaaccgttcgggtacagcaggccaccaatcatcggcggcaggaaagtcagcagcgccgttttaaaacgtcccattgccgagtcatcaaaaccaaacagatccgccagatagtcaaacagccccagcgtcacgccaaggaaggaactggcgaccgcaaagttagagaacaccaccagcagcagatccaggctgcggctgttcagcacgccgctcaacgcctgtaccagcacatcaatattgccgcctttctgcgcaatgccgataaattccggacgcgggatgttgcccatcgtccccagcagccagacggaatagagcgctagtgccagtaacgtcccataaatcaggcatttgacgatggtacgcggatctttgccgtaatatttcatcaagctcggtacgttaccgtgataaccaaaagaggccagacaaaatggcagcgtcatcagcaggtacggcgtatatgacgcgtggctttcagccacgttaaacaacgtggcaggctgaacgtgccccaacaggctgccgaaggtcaggaagaaagtaatcactttcgcgcccagcacaatcgccgtcatccggctgaccgccttcgtactcagccacacgacaaacgccaccagcagcgcaaaggcaaaacctgccgctcgcgccggaacgttcagcgacatctcagcaaaggtatgatgcagaattgagccgctcgccgagatataggcgtaagtcaggatgtagagcacaaaggcaatagaaatgccgttgaccacgttccagcctttccccaacagatctttggtgatggtgtcgaaactcgaaccaatgcggtagttaaggttggcttcgagaatcatcagcccggagtgcagcatacaaaaccaggtaaagaccagcgccgccatcgaccagaagaaccacgccccggacatgaccaccggcagggagaacatccccgcgccaatgatggtgccgccgataatcaccacgccgccaagcagcgaaggtgacgtttgggtggtggtaagtgttgccattcagctctctctccagtcatttatagtgtgactatctctcaatacgctgcactgtaccagtacacgagtacaaaagaaataaaaaaagccccgattgtgacgatcggggctgtatattttactttacgctgtgaatgcgcaggtcagcgtgagttacgcatcaccgccgaaacgacggcgaccggtagagtcatcacgacgcggaccacggctttcacgacgttcgccgctgaagcgacgaccatcaccacgaccaccttcacgacgttcgccgctgaaattacgaccgccttcacgacgttcgccactgaagctacgaccaccgccgcgacgttcgccgcccgcgtgcggaaccgcatcacccaacagctgcatattcatcggcttgttcagaatgcgggtacgcgtgaagtgctggagcacttcgcccggcatacctttcggcagctcgatggtggagtgagacgcgaacagcttaatgttgccaatgtaacggctgctgatgtcgccttcgttagcgatagcgcccacgatatgacgaacttcaacgccgtcatcacggcccacttcaatgcggtataactgcatatcgccaacgtcacgacgttcacgacgcggacgttcttcacgatcgccacgcgggccacggtcattacgatcgcgcggaccacggtcgtcacggtcacggaattcacgcttaggacgcatcggcgcatccggcggcaggatcagcggacgctcgccctgcgccattttcagcagtgcggcggccagcgtttcgagatccagctcttcaccttcggcagacggctggattttcgccagcagcgcacggtactgatccagatcgctgctttccagttgctgctgaactttcgcggcgaatttttccagacggcgtttacccagcagttctgcgttcggcagttccacttccggaatggtcagcttcatggtgcgttcgatgttgcgcagcagacgacgctcgcggttctcaacgaacagcagcgcgcgaccggcgcgacccgcacggccggtacgaccgatacggtgaacgtaggactcggagtccatcggaatatcgtagttcaccaccaggctgatacgttcaacgtccagaccacgtgccgcaacgtcggtagcgatcaggatgtccagacgaccatctttcaggcgttccagagtctgctcacgcagcgcctggttcatatcgccattcaacgcggcgctgttgtagccgctacgttccagcgcttctgctacttccagggtcgcgtttttggtacgcacgaagataatcgccgcatcaaagtcttccgcttccaggaaacgcaccagcgcttcgtttttacgcatgccccagacagtccagtagctctggctgatgtcaggacgggtagtcacgctggactgaatgcgcacttcctgcggctctttcataaagcggcgggtaatgcgacgaatcgcttccggcatggtggcggagaacagagcggtctgatgaccttccgggatctgcgccataatagtttcaacgtcttcgatgaagcccatacgcagcatttcgtcggcttcatccagcaccagaccactcagtttagagaggtcgagggtgccgcgttttaagtgatcaagcagacgtcccggcgtaccgacaacgatctgcggcccctgacgcagggcgcgtaactgcacgtcataacgctgaccgccgtacaaggcaaccacgtttacgccgcgcatgtgtttagagaaatccgtcatggcttcggcaacctgtaccgccagttcgcgggttggcgccagcaccagaatctgaggtgccttcagctcaggatcaagattgttgagcagcggtaaagagaacgctgcggttttgccgctaccggtctgggccatgcccagcacgtcgcgaccgcccagcagatgcggaatgcactctgcctggattggagatggtttttcgtaacccagatcggtaagggcttcaaggataggagccttcagccccagatctgcaaaagtggtttcgaattcagccatgtagtacgtgtgcctcaaaattaatggcggccagtctacataactcatcatgaaattgatctgcaattttcattgaaaagtgtgaaccggctcaaagtaggtgtattaacgaacaacaacgccctcacccgcgaaggtgatggcaatcaaaaagattacgggctgatatgttcgtcagctattgctggtccgattctgccaggtcatcttggtcctggcccaggagcgataattccaacaatgcgtatcggtgctcaacaaagttatgaacgttgttggccaccgccagtttgaacagagccgtggcgctgtccaaatcccccagacttaggtaatacttacctaaatagaagttggtttcactgagatgctcagcgagcgaggtgttatccgttgcgtccgccttgagcctttccatcagcgttgcttcgctaatgtcgcccaggtagaactcgacaatgttccatccccattgctctttatccgatttttcgaagcgtgcttttaacgcttctttcgcctgcttctcattaagcttctgctcaacaagatacagccacaggctgcggtaaggatcattgggatcgtcttgataaaacgccagcagatcatcttgcgctaacttatcacggccgccgtaatacaatgcgataccgcggtttaagtgcgcgtagttgtaagttggatcaagctctagtacagaatcaaacgcttcataggcagcatcaaaattgcctgcctgcgttaaataaatgcctaagtaattgaatacttcaggcatatccggtctgattgccagcgcttgtgaaaaatcatttcgcgctaatgccctcaaaccaagactatcatacaacactccgcgctcatataaaagctgtgcgcgttcgtcatcggttaaagcccgactggcaagaatctgttccatacgcgccagaatcacttcctgctgtaaagtcggttgcaatggtactgcgaggacttcacttttacgccaggcggaattactgcatcctgcaagcgtaagtgctgtcgcaacgaaacaccagcgcaaaaaaggcttcatttcccactcccgaagacaacgattgaatgaacgtcctgttccccggtggctcaacaaggcgtccagccaggtctaaagccctccgcactgcggagggcaaaaggctaccttactcggcctgttcgctcgccggagcttccggcgcagccgcaggttgagactgctcggttgcttctttaatgctcagacgtacacggccctggcggtcaacttccagaaccttaaccgggacttcctgacccatctgcagatagtcggtcactttctctacacgtttatccgcgatttgagagatgtgaaccagaccttctttcccgccgccgatggcaacaaacgcgccaaagtcaacgatacgggtcactttaccattgtagatacggccgacttcgatctctgcggtgatctcttcgatacgacggatagcgtatttcgctttttcaccgtcggtcgccgcgatcttcacagtaccgtcatcttcgatttcgatggtggtgccggtctcttcagtcagcgcgcggatcacagaaccgcctttaccgatcacgtctttgatcttgtccgtgctgatcttgatggtatggatacgcggcgcaaattcagagatatcgccgcgcggcgcgttgatcgcctgttccatcacgcccaggatgtgcagacgcgcacctttagcctggttcaacgcaacctgcatgatctctttggtgataccttcaattttgatatccatctgcagcgcagagataccgtcgcgggaacccgccactttgaagtccatatcgcccaggtgatcttcgtcgcccagaatgtcagacagtacaacgtagttgtcgccttctttcaccagacccatagcgatacctgctacggcggctttaattggcacgccagcgtccatcagcgccagagaagcgccgcacacggaagccatagaagaagaaccgttggattcggtgatttcagacaccacgcgaacggtgtacgggaatttatccatgtccggcatcactgccagcacgccgcgcttcgccagacgaccgtgaccaatttcacgacgcttcggagaaccgaccatgccggtttcgcctacggagtacggagggaagttgtagtggaacaggaagctgtcagtacgctcgcccatcagttcatcaagcacctgcgcgtcacgggcagtacccagagttgcggtaaccagcgcctgcgtttcaccacgggtaaacagagcggaaccgtgagtacgcggcagtacgccagtgcgcacgtccagaccacggatcatgtctttttcacggccatcaatacgcggctcgcctgccagtacgcggctacgcaccacgtttttctcgatagcgtgcaggatttcgcccagctcgttagcatccagagtttcatcttctgcaataagctgctcgatggtttcggatttgattacgtcaacctgagcatagcgctcttgtttatcggtgatgcggtacgcgtcgctcagacgagattcagccagcgcagcaacacgcgcgttcaacgcgtcgttgacggcttccggctgccagtcccaacgcggtttaccggcttctttcaccagatcgttgatcgcctggataacaacctgctgctgctcgtgaccgaataccaccgcgcccagcatagtgtcttcgctcagcagttcagcttcggattccaccatcagcacagccgcttcggtaccggcaaccaccaggtccagcttgctttctttcagctcgtcctgggtcgggttcagcacgtactggtcattgatgtaacctacgcgcgccgcgccgattgggccgttgaacggaatgccggacagcgacagcgcagcggatgcgccgatcatcgccacgatatccgggttaacctgcgggttaacggaaacgacggtcgcgataacctgcacttcgttaacgaagccttccgggaacagcggacgaaccgggcggtcaatcagacgcgcgatcagggtttcgccttcgcttggacggccttcacgacggaagaagctgcccgggatacgaccagcagcgtaggtacgctcctgatagttaacggtcagtgggaagaagtcctggcctggcttggcttttttctggccgacaacggtaacgaatacggcggtgtcatccatgcttaccataacagcggcagtggcctgacgcgccatcatgccagtttccagcgtaacggtatgctgaccgtactggaatttacgaacgatcggattaagcaaaataatatcctttccaatttttgacggcataatacgcgccgtcgttaatacccgatcttctgcgcatcctcgcgactaatgacaaccctaaccctgatatgggtaaagcctctcattagccgcgcgaacctctgcaacggaagatcattcatagcaacaatacattagtttccagcgaattgctgccatctgctggaaaaaaggggccatgaaggccccctctttctgaaactcgaaagaattagcgacgcagacccagacgctcaatcagcgcggtgtagcgtgcaacatctttacgtttcaggtagtcgagcagtttacgacgctgagaaaccatacgcagcagaccacgacggctgtggtgatcttttttatgctctgcaaagtgaccctgcaggtggttaatctgtgcagtcaacagagcaacctgaacatcggtagaaccggtgtcgtttgcgtcacgaccgaactcagaaacgattttagctgtagcttcagtacttagagacattttaaaactccaaagtatttaagaatgagaggacgccgatctctaattcagcgatcccagtgtacgccgcgtaaactgttaaataatttacgcgacgttaagcggcggtattctactcgcagcgctctcttatcgcaagacgaagcgacattacgctgggtactctactaccagccgacgaggcgcgacacggccttcgtcgtcaatttcgcccataccgataaatttatcgtcttcaccttccgtcacacgaaccagtcccttcaacggcgcgcccgtggtacgaaccgggttgccatttttgaagtataccgaagatgttaacggcagattaacaacaggatagtccgaagctggactgtccattggcatcaataatggatcgagcaactgcgccgccggaacgccctgctgttccgcctgtgctaccagcgtctgcaaatgctccagcgtcaccatacgatccaccggatacttgctgaccgtcagacgacgcaggtacgttacgtgcgcgccacagcccagtttctcacctaaatcatcaataatggtacgaatataggtgcctttggagcaatgaacttccagctccagctcgttaccttcatggcgaataaacagcagctcatagacggtaatcgggcgggcttcgcgcggcacttcgataccctggcgggcatattcgtacagtttcttaccctgatacttcagcgccgaatacattgacggaatctgctcaatatcgccgcggaaagtctccagcgcgctcgcaagctgctcagcgctgaaagtcaccggacgctcctgcacgatttgaccatcggcgtcagaggtatccgtgcgctgccccagacgggcaataacacgatagcgtttgtcagaatccagcaggtactgcgaaaattttgtcgcttcgccgaggcaaatcggcaacatgccggtcgccagcgggtccagcgcgccggtatgcccggcgcggttggcattgtagatgcgcttaactttctgcagcacgtcattgctggacataccctgcggcttatccagcagcagaacgccgtgaatgtcgcggccacgacgacgaggacgactcatcagtcctccttgctgtcgtccgggttcacacgacgttcttcgtcatgtttcaccacgttagttaccaggttggacatacgcatcccttccaccagcgagttgtcgtagaagaaggtcagttccggcacgatgcgcagacgcatcgctttacccagcaagctgcggatgaaaccagacgcttcctgcaacgctttgatgcccgcttttactgcgtcttcatctttgtcgttcaaaaaggtgacaaacactttggcataggccaggtcacgggacatttcgacaccggagacggtagtcatcatgcccaggcgcgggtctttaatttcgcgctgcaggatgattgcgatctctttttgcatctcttgcgctacgcgctgagggcgaccaaattctttcgccataataaattctccagaataaagacaaaaaaggggccataagcccctttttaaatttcttgccgggtggcgcttcgcttacccggcctacgcctaatcatcttctaaggattttggattgcaacaaggcggcaagctcgtaaatccccgggagcatagataactatgtgaccggggtgagcgagcgcagccaacgccgttgcggcccaaaagacgacgaagattaagcgatggtacgttggatctcgataatttcgaatacttcaatcatatcgccaacgcgaacgtcgttgtagttcttcacgccgataccacattccatgccgttacggacttcgttaacgtcatctttgaagcggcgcagggattccagctcgccttcatagataaccacgttgtcgcgcagtacgcggattgggttatggcgtttaatcgtaccttcggtaaccatacagcccgcgatcgcgccgaatttcggcgatttgaacacatcgcgcacttcagccagaccgataatctgctgtttcagttccggagacagcataccgctcatcgccgctttcacttcgtcgatcaggttatagatgacggagtagtaacgcagatccaggctttcagattcgatcactttacgcgcagaggcatcggcacgaacgttgaagccaaccagaatggcgttggacgccgcagccagggtcgcgtcggtttcggtgataccacctacgccagaaccgatgatcttcactttcacttcgtcggtagacagtttcagcaaagagtcggagatcgcttccacagaaccctgtacgtcggccttcagcacgatgttcacttcgtgaacttcgccttcggtcatgttggcgaacatgttctcaagtttagatttctgctgacgcgccagtttaacttcacggaatttaccctgacgatacagagcaacttcacgcgctttcttctcgtcgcgaacgacggtcacttcgtcacccgcagccggaacgccggacaggccgaggatttccaccggaatggacggccccgcttccagcacttcctgacccagttcgttacgcatcgcacgcacgcggccgtattcgaagccacacagcacgatatcgcccttatgcagcgtaccttcgcgtaccagaacggtagccaccggaccacgacctttatccaggaaggattcgatcaccgcaccgctcgccatacctttacgaacggctttcagttccagaacttcggcctgcagcaggatagcgtccagcagttcgtcgataccggtgcccgctttcgcagacacgtgaacgaactggctctcgccgccccactcttccggcagaatgccgtactgggacagttcgttcttaacgcgatccggatcggcttccggcttatcgattttgttcaccgcaaccacgaccggcacacctgccgctttcgcgtgctggatagcttcgatagtctgcggcatcacgccatcgtctgccgctaccaccagaaccacgatatccgttgcctgggcgccgcgagcacgcatcgaggtaaacgcggcgtgacccggggtgtccaggaaggtgatcatcccgttgtcagtttcaacgtggtaagcaccgatgtgctgggtaatgccgcccgcttcgccagaggccactttcgtggaacgaatgtagtccagcagagaggttttaccgtggtcaacgtgacccatgatggtcacaaccggggcgcgcggttcagccgcagcgccggtatcacggtcgctcattaccgcttcttccagttcgttttcacgacgcaggataactttgtggcccatctcttcggcaaccagttgtgcggtttcctggtcgataacctggttgatggtggccatagcacccagcttcatcatcgctttgatgacctgagagcctttaaccgccatcttgttcgccagttcgccaacggtgatggtttcaccgatcaccacgtcgcggttaacggcctgagcgggcttctggaagccttgctgtaaagaagaccctttacgcttgccgcctttaccgccgcgaaccgcagcacgcgcttcttcgcgatcggctttggattcggcatgtttgccttttttcgccggacgcgctgcttttgcattacggccacgaccacgaccgccttctacttcacgatcgttttcgtcttcggcctggcgagcgtgctgagaagtggtgacatgatagtcactggtgtcttctactggctcaggcgttgcggtccatttgttttcttccgccatgcggcgagcttcttctgctacacgacgcgcttcttcttcgagtttgcgacgtgcttcttcttccgctttacgcttcagctctgcagcttcattctcacggcgggctttttcggcctgggcggttttggtcatatcgtcagtctgttgattgctcactttgtctttttccgcagcttcacgtttcgctttttcagcggcttcacgcttagcttgttctgcggcctcgcgttcagctttttgttgcgcctcgcgtttggcctgttcttctgcctcacgacgggcttgctcttccgcttcacgctgcgcctgctcttccgcggccaggcgttcagcctcttgcggatcgcgtttcacaaaggtgcgcttcttgcggacttcgatttgtaccgatttactttttccaccggtaccaggaatattcagggtgctgcgcgttttacgctgcagcgtcagtttatcgggaccagaaaccgcttcgcggttcaggtgcgccagtaaagtctgtttttcttgtgcggacacagagtcgtcagcagatttccggatacctgcatcagcaaactgctgtaccaggcgatccacggaaacctgtctctctgcggccagcgcttttagggttacatctgtcatgctgttccttcctgctacagtttattacgcttcgtcgccgaaccagcaaatattacgggcagccataatcagctcaccggctttttcgtcggtcaacccttcgatatcagccagatcatcaatgccctggtcggcgagatcttccagcgtacaaacaccacgagccgccagtttgaaagccatatcgcgatctaatccttccagattcagcagatcgtcagccggtttgttatcaccgaggcttgcttcctggtcctgcgccagagtggccagtgcgtttttagcacgctcgcgcagtgcttcaacggtcggctcatcaaggccgtcaatttccagcagttctttcattggcacataggccagttcctcgagcgtggagaaaccttcttctaccagaacggtcgcgaactcttcatcaatatcaagatatttagtaaaaatctcgatagcggcatgtgcttcagcctgatgtttagcctgcaagtcatcaacggtcattacgttgagttcccagccgctcaattgcgaagccaagcggacgttctgaccattacgtccgatcgcctgcgccagattaccggcttcaacggcgatatccatggtatgtttatcttcgtccaccacgatagacgcgacgtctgccggcgccatcgcattaatgacgaactgcgccgggttatcatcccacagcacgatatcaatacgctcaccgcccagttcggtagagaccgcctgaacgcgcgcgccgcgcatccccacgcaagcgccgaccggatcgatacgtttatcgttggttttcactgcgattttcgcacgagaacccggatcgcgagccgccgctttaatttcaatcacttcttcgccgatttccggcacttcgatgcggaacagttcgatcagcatttccggcttggaacgggtgacgaacagctgcgcgccacgcgcttccggtcgaacagcatacagcacgccgcgaatacggtcgccagggcggaagttttcgcgcggcagcatatcttcacgcagaatcaccgcttcagcgttaccggccatcccttcggatttaatttccagagagatattgtcgcggttcactttcttcaccacgccagtgacaatttcgccttcctggtcgcggaactgatcgacaaccatcgcccgttcagcttcacggaccttctgcacgataacctgtttcgcagtctgcgtggtgatacggtcaaaggtgacagattcaatctgatcttcaacatagtcgccgacattcaggctttcgtcttcaaaacgcgccgcttccagcgtaatttccttcgtcggcatggtcacttcttcaacgatcaaccaacggcggaaagtatcaaaatcaccgcttttacgatcgatttctacacgaacatcgatctcctgctcatattttttctttgttgctgtcgccagcgcactttccagcgcttcaaaaattttttcgcgtggcagcgctttttcgttggagacggcttcaacaacagccaaaatttctttgttcatcgcgggcttttcacctcatccagactgttaaaagtggggaaccaggttcgccttctggatattactcagcgcgaacacttcatctttgccttcgactgtgacggtaatcatttcaccgtccaccgctttgataatgccctgccacttgcgacggttctgtaccgccatgcgaagaaccagcgcgacttcttcaccctggaaacgcgcataatgatcggcagtgaacataggacggtcgagacccggtgacgagacttcaaggttgtaagccacggagataggatcttcaacgtccagcaccgcgcttacctggtggctcacatcagcacaatcatcaacattgatgccatcttcactatcaatatagatgcgcagtgtggatgtgcgaccgcgaataaattcgatgccgaccagctcgtagcctaaggcttcaactggcgctgtaatcatctctgttaatttttgctctaatgtggacaagcccacccccaagacataaaaaaagggcctaaagcccagttattctgtagtcagataacaaaaaaccccgataaatcggggctttagataactgaaccctataaccgcaacggcggtctggtgtaccttccgaaagaatttttttcaaatccagctacgaaggacataatcttcacagtatatttgaaaaagaactctaagggaaagtggttgcgggggccggatttgaaccgacgaccttcgggttatgagcccgacgagctaccaggctgctccaccccgcgcctgaaacgtggcaaattctactcgttttgggcaaaatttgcaaatactgctgggatttggtaccgaggacgggacgtaaaatctgcgcacagtatagtgacctggcatgagttatgtcaaccctattcccaatatgcagatgaatgaatatcactcttcgttatactcatcccacctctccggcttatacacgcatgtcacaacgttatttcagtaaaccttcactaaacgcttcctgtctctgctaaaagatgattaaatgaaaactcatttattttgcataaaaatgcactaaagcagaaaccgatctcattatcagtcaatcaagcagggttctattctatgacgacgattcttaagcatcttccagcaggtcaacgtattggtatcgctttttccggcggtctggacaccagcgccgcgctgctgtggatgcgacaaaaaggagctgtcccatatgcctatactgcgaatctgggacaaccggatgaggatgactatgacgccattcctcgtcgcgcaatggagtatggcgcagagaatgctcgcctgattgattgccgcaagcagttggttgcagaagggatcgcagcgattcagtgcggcgctttccataatacgactggcggactgacctatttcaataccacgccgctgggccgtgccgtaaccggcacgatgctggtcgccgcgatgaaagaagacggcgtgaatatctggggcgacggcagtacctataaaggcaacgatattgaacgtttctatcgttacggcctgctgacgaatgctgaattacagatttacaaaccgtggctggataccgactttatcgatgagctgggtggtcgccatgagatgtctgaatttatgattgcctgcggtttcgactataagatgtcagtcgaaaaagcctactccaccgactccaacatgctcggcgccacgcatgaagcgaaagatctggagtttcttaactccagcgtcaagatcgtcaacccgattatgggcgtgaagttctgggacgagagcgtgaagatcccggcagaagttgtgaccgtccgcttcgagcagggtcaccctgttgccctgaacggtaaaaccttcagcgatgatgttgagatgatgctggaagcgaaccgcatcggcggccgtcacggcctgggtatgagcgaccaaattgaaaaccgcatcattgaagcaaaaagccgcggtatttatgaagcccctgggatggcgctgctgcacatcgcttacgagcgtctgttgaccggtattcacaacgaagacaccattgaacagtatcattctcatggtcgtcagctgggtaaactgctgtatcagggccgctggttcgactcgcaggcgttgatgctgcgtgacggcctgcaacgttgggtcgccagccagattaccggtgaagtgacgctggaactgcgtcgcggcaacgactactccatcctgaacaccgtgtcagacaacctgacctataaggctgagcgtctgaccatggagaaaggcgagtccgtattctcaccggacgatcgtattggccagttgaccatgcgtaatctggacattaccgatacccgcgagaaactgttcggctacgcgaaagcgggtctgttaaccgcctcttccgcgaccggtctgccgcaggttgagaatctggaaaacaaaggcaaataagcccgcgtcgttgatgcaacaggccgcgaaagcggccttttttgtgaatatcaccccaggttgatgcaaatggcggatttgccggttaatctaactggacaacatttcgcaccctgtcaaagcattgtgcagccatgtctttttcagtcatcattatatagtcaatgcccccgccaaaatccggcccagcgacagccagtaatgctgttgtagaatgaatttcttcatcccagctaaaaagctgtcgccaccttgtatcattttgattcagttcatcttccacactacgttggagaggaattgtccaccctcccagaagatcgccggaatagcaggcatcaactcgatacgggttgtcctgttcgtaatcacttaacgcgtcataccatgattcatacgctttctgctgcgtaacgcttaacccctcgcagactgacgaaacactgataacggaaagaggttccaggcactcaacctgtgtacacaattgccatggttcacgaaattcaatcttattgtaaaaagccagcaagtcatctggcacagctagcgtgcttaatgtatctacctcaacatcgtgccagaaaacaaagggctgccgatcttcccaggtaacatcgacaaagaagctcaataacccccgcctgggaagcagtggatcaaaccccgggagtaacgccaggtcactcaagtttagttgggcaacgaaagcaagcggaaaatcaaccaactgattctctatgcggatgtcaatttcggttaataaccgctgctgcactaaccgatacttttcctcgtcaaaatcttccgctggctgcccaagcagcttacgcccttcattgagcagctcataactcattttcatttcatgaacaaacctggcatttcgcgttttttcagctttcagctttagtacgcgagatgtggcattaaccgatttttttcgtataggccagctttgtcctaatggccagtcgggtagaccgcccaaccgcgatgcccccacctttactgtttccatatcccgcagacaacgtttaaatgcaatagcagcacgtgcctgttgcacgactttctcctgaatagcagagctcaaattggatgtgcgcaattcagcaatcaatccagcacgatcgaaaaataaactcattaatctcttccttagatattcggctcagtgcaaaggaagattagataaaactacttgagcaaaagatatggagggggataacagatacaagcatttcagattatagctgagcaactactggcttcaatgaacgaagatgatctcgtaatcggtggagtgaacctgacgcagggagatcaccagagaggacatacatgagtatgtatgtagggctatctcaacgtattgacggggccatgccagggacgcgtgtaagcgtgcttcaacctcctctctgagagcagtttcaacagacgaaaaaaaagacgcttttcagcgtctttctttcggaatattggtaccgaggacgggacttgaacccgtaagccctattgggcactaccacctcaaggtagcgtgtctaccaattccaccacctcggcacggatactgctattagcgcgggatatcgctggtcggctgggccggtgcagcaggttgagtctgctcggtcttcgccggcgcactcagattttcccactcgcttcctttattggttttgttgctattgatattacccaacaccagactgatgatgaagaacagcgtcgccaataccgccgtcattcgggtcatgaagttaccagaaccacttgaaccaaatagcgtagcggaagcgcctgctccgaaggaggctcccatatcagcgcctttaccttgctgcagcatgatcagacctacaaggccaattgccacaataaggaaaacaactaaaagagcttcgtacataatcaacctgttccttgcggagttgccgcgtaccaatgcttctaccaataaagcgggatttttactgtttcccactgaagcgggtgtgaatactaaccaaagcgaatgaccttcgcaagggcaatttaagcgcattgtatcaactgcggaaaaaaacagcaaaagcgttgttttttgcgggccgtaaggcggcaaccgccgcctttttagtcacttaaacgcttaaacggcttttaccgcatccgcgatacgatgggcgaatgccgtaacctgcgcttcatcctcgccttccaccatcacgcgaatcagcggttcggtaccggatttacgtagcagtacccgcccacgattgccgagcgtggcttctacgtccgccgttaccgctttcaccgcttcattttccagcggatcgccgctaccggcggtgtaacgcacgttaaccagaatctgcgggaacattttcataccgctgcacagatcgtgcagactcatatgattacgcaccatcgccgccagaacttgtagccccgctacaataccgtcgccagtggtcgttttatccaacagaataacgtgaccagagttttccgcgccgatgcgccagcctttttcctgcaatttttccagcacgtagcggtcgcccactttcgcccgggcaaacggaatgccaagctgcttgagcgccagctccagccccatattgctcatcagcgttcccaccgcgccgccgcgcagctgcccctggcgcagcccttcgcgcgcgatgatatacatgatctgatcgccatcgactttattgccttcatggtcaaccatgatgacccggtcgccgtcgccgtcaagcgcgatgccgaggtccgccttctccgccaacacgcgcgcctgcaacgcgcgcacgtcggtcgcgcccacttcttcgttaatgttgacgccgtttggctcacagccgatggcgataacggtcgcgcccagctcgcgcagcacattcggcgcgatatggtaggtagcgccgttggcgcaatccacaaccactttcaggccattgaggctcagttcgttcgggaaggtgcctttacagaactcaatatagcgtccggcggcatcgacgatgcggctcgctttacccagctcagcggagtctacgcaggtgatctctttttccatttcggcttcgatggcttcttccacatcgtcaggcagtttcgtaccgtcgatagagaagaatttaatgccgttatcatagaacgggttatgcgaagccgagataacgatacccgcctccgcgcggaaagtccgcgtcagataggcgacggctggcgttggcataggtccggtaaacgaggccgacagtcccgcagcggcaaggcccgcctccagcgcggactccagcatatagccggaaatacgcgtatctttaccgataatgattttacgcgagccatgacgcgccagcacttttccggcagcccaacccagtttaagcacgaaatcaggtgtaatgggggcattgcctacacgtccgcgaatcccatcggtaccgaaatatttacgattactcatagcgtttgtttccctttgcagacagagtggcttccaccacccgcatcgcctctacggtttctttgacgtcatggacgcgaatgatctgcgcgccctgcatcgcggcaattaccgcgcacgcaaggctgccgttcagacggtctgatggtcccacgttaagtaactgaccaaccatcgttttacgtgacatgcccaccagcagcggcaggttaaaatgatgaaactcacccagtcgcgccagtaaggtataattgtgagagagatttttaccgaaaccgaatcctgggtcgagcaacaatttctcttttgcgatgccggccttctcacaacgtgctatttgctcaataaagtagcgattcacctcggcaaagacatcgtcatatttcggcgcctcctgcatggttttggggttgccctgcatgtgcataagactgaccggcaagccggtttccgctgccgcttccaacgcgccgggttcggagagtgaacggacatcattgataatatgcgcgcccgcccttgccgcttcacggatcacctcgggtttagaggtatccacagaaatccacacttcaaaacgttgcgcgattgcttccagtaccggaataacgcgatccagctcttcttccacgctcacttctgccgcgcctggtcgcgttgattccccccccacatcaataattgtcgccccggcattcaccattaaattcgcatgtttcaccgcctcaatcagcgtgttatgcgcgccgccgtcggagaacgaatccggcgttacgttcaggatccccataacatgcggatgagtgagatcgagcgtggcgccctgagcgaagagtttcatggtcaaaatccctgttttatttatggtgagttaaaaaaataaatatcctccggcatagccggaggtttttcagatgcgcctataaggctctcttaccagccgcgccctaacaggcgcatacgatctgacatttgcatcaaacttcgttacttacggcccgtaaacgggctgcccggatacgggatcgataattgctcacccattttatcctcttcaagctggtgctttatgtagtcctgtatcttcgccgtgttcttacccaccgtatcgacatagtaccctctgcaccagaactccctgttcctgtatttgaattttagatccccaaactgctcgtaaagcatcagactacttttacccttcagatatcccatgaaactcgacacactcatcttcggcgggatctccagaagcatgtgaatatgatctgcacaacattctgcttccagaattcgtacgtttttccattcacacaattttcttaatatgctgcctactgccctacgcttctctccatagaacgcttgtcttcggtatttgggcgcgaaaactatgtgatatttacagttccatcgggtgtgcgctaagctcttttcgtcccccattgggacccccttttgatttcttgttgaacttttgcagttgccagaccgcaagatgttttaacaaatcaaaaggggttttaataactggcttaaagctgaaagctttccggaacccccagcctagctgggggttttccatagacaagaaaaaccccggggcaagccccagggtttcggtgagcgctaaacataatgttgtaaaacaaatgcttatttgtcgcccagctgctctgacatcgtgttgcccgggttcggcgtgcgtggttcatcaaccggacgcggcgcctgaggcgtaccattgctgtcagagttattggtgccgtttggatcttcccagcccgcaggcggacgcacttcacgacgcgccatcaggtcatcaatctgcggcgcatcgatggtttcatatttcatcaacgcatctttcatcgcgtgcagaatatccatattgtcagtcaggatctgacgagcgcgattgtagttacgttcaatcagcgctttcacttcctggtcgatgatacgcgcagtttcatcagacatatgtttcgcttttgcgacgctacggccgaggaatacttcgccctcttcttccgcatacagcaacggaccgagtttctccgagaagccccactgggtgaccatgttacgcgccaggttagtcgcgactttaatgtcgttcgacgcgccggtggaaacatgctcaacgccgtagataatctcttccgccagacgaccgccgtacagcgtgctgatttggctttccagcttctgacggctggcgctgatcgcgtcgccttcaggcaggaagaaggtcacgcccagcgcacgaccgcgcgggataatcgtcactttgtgcaccggatcgtgttccggcaccaggcgaccgataatcgcgtggcccgcttcgtggtacgcggtcgactctttctgcgcttccgtcatcaccatggagcgacgttcggcgcccatcatgattttgtctttcgctttctcgaactcaaccatcgacacaacgcgcttgttaccacgagctgcaaacagcgccgcttcgttgaccaggttcgccaggtccgcaccggagaagcccggcgtaccgcgcgcaatgatcgccgcatcaatatccgtcgctaacggtacgcgacgcatatgcaccttcagaatctgctcacgaccgcgcacatccggcaggcctaccaccacctgacggtcaaaacggcctggacgcagcagcgccgggtccagaacgtccggacggttagttgcggcgataacgatgataccttcgttaccttcgaagccgtccatctcaaccagcatctggttcaacgtctgctcacgttcatcgtgaccgccgcccagaccagcgccacgctggcgacctacggcgtcgatttcatcgatgaagataatgcacggcgccgctttcttggcctgttcgaacatgtcacgcacacgagacgcgccgacaccgacgaacatttccacaaagtcagaaccggaaatcgtaaagaatggcaccttcgcttcacccgcaatggcttttgccagcagggttttaccggtacccggcgggccgaccatcaggacacctttcggaattttaccgcccagcttctggaaacggctcggttcacgcaggtattcaaccagttccgccacttcttctttcgcttcgtcacaacccgcgacgtcagcaaacgtggttttgatctgatcttccgtcagcatacgcgccttgctcttaccgaacgacatggcgcctttgccaccgccgccctgcatctgacgcatgaagaagatccagacgccgatcagcaacagcatcgggaaccaggaaatgaagatagaagccagcaggcttggctcttcaggtggttcgccaacaaccttgacgtttttagtcagcaggttatcaagcagcttcggatcattaatcggaatgtaagtcgtgtaacggttactatctttcttggtaacgttgatctcacgtccgttgatacgcgcttcgcgaacctggtcctgattgacctcttgcaggaaggtagagtaatccaccttacggccattagactcgctgggcccaaagctctggaatactgacatcagcacaacggcaatgaccagccagagtattaggtttttcgccatgtcactcaagggattaacctcttattacaactgtgttaaaaacagcgtcaggatactctatatccagtttctttcaaaccttacgtctgaaatctgccggttatcactttcgcccggtcgctacaatgtacacttcacgcgaacgcgcacgcgaagagtccggcttacgaactttaaccttcgtaaacagggagcgaatttcccttagatactcatcgaaaccttcgccctggaacaccttcactacaaaacttccgcctggcgccagcacatcgcggcacatctctaacgccagctccaccagatacatggcgcgggggatatccaccgccggtgttccgctcatgtttggtgccatatccgacatgacaacttgtactttactgtcacccacgcgttccagtaacgctttcatgacaagttcatcacgaaaatcgccctgaagaaagtccacaccaacgataggatccataggtaaaagatcacaagcgatgatgcggcctttgccgccaatctgcgtgaccacatactgtgaccagcctcctggcgcagcgccgagatcgactaccgtcattcccggcttaaaaagtttgtcactttgctgtatttcatcaagtttaaaccaggcacgggagcgtagcccctttttctgcgcctgttgaacatatttatcgctaaagtgttcctgaagccagcggcttgagctggcagaacgctttttacctgtcatttaactttcccgtcggggcagttcatcgtagccaatggcgtaaatttctacacgcctatttggcgatataagggagatggcggtagaatgacccgttttcaatcccaacgtaagcaaaaatatacgatgaatctgagtactaaacaaaaacagcacctaaaaggtctggcacatccgctcaagcctgttgttatgcttggcaataatggtttgaccgaaggggtactggccgagattgaacaagcgttagagcaccatgaacttatcaaggtgaaaatcgcctcggaagatcgcgaaacaaaaaccttgatcgtggacgctatcgtgcgcgaaaccggcgcctgtaacgtacaggtcatcggtaaaacgctggtgctgtatcgcccaactaaagagcgtaaaatctcgctgccgcgttaaggatatcctaaagtcgaacacaaaatctgtgtaaaacgaggggttttccacgagcaggagagcaaaatgccacgctctctccgttgataaaaggccgctatgcggcctttttcctttctttacaatacaccaacaatttgcgtattgagtactgcttaaaggtattccactttaagcacttcgtattccacatcgccgccaggcgttttgatcaccacgacgtcatcctgctctttgccgatcaggccgcgagcgattggcgagtttaccgaaatgagattttgcttaaaatccgcctcatcgtcgccaacaatgcggtaggtctgctcttcgtcggtgtccaggttcagcaccgtgacggtagcgccgaaaatcacgcgaccattgttcggcattttagtgacatcaatcacctgcgcattcgacagttttgcttcgatatctttaatgcgcccttcgcagaaaccctgctgttcgcgtgcagcatgatactccgcgttttcttttaaatcgccatgttcgcgcgcttcggcgatagcggcgatgatttcaggacggcgcacagatttcagaaaatccagctcttcgcgcagtttttcggctccgcgtaaggtcatcggaatagcttgcatttgttatacctcttgaacattcctgtaggggcaatgaactctaccccggctgctaagccagccccggcatatgccataccagggtcagaagcaaaaaaacaccaacccgggcgcgcagtcccaggtcagctacaatttcctctttgataaccattttaccctggagttccctatgggtcatcgtttactttttagggcgttgcgccgtagtatgacggcttgtttccagggtgttagcgcgagattatgcgattttccagatttatcatcggattgaccaccagtatagcgttcagcgttcaggccgcgaatattgacgaatacatcaaacagcttccggccggcgccaacctcgcgctgatggtgcaaaagattggcgcgcccgcgccggctattgattatcatagtcagcagatggcgcttcccgccagtacccaaaaggtgattaccgcgctggcggcgctgattcaactcggcccggatttccgttttacgaccacgctggagactaaaggcaacgtcgataacggcatcctgaaaggtgacgtaattgcgcgcttcggtggcgatccaacgctaaaacgtcaggatattcgcaatatggtcgcgacgctgaaaaagtccggcgtcacgcaaatcgacggcaatgtgcttatcgacacgtcgattttcgccagccacgataaagcgccaggctggccgtggaacgacctgacgcagtgtttcagcgcgcctcccgccgccgccattgttgaccgcaactgtttttctgtgtcgctttatagcgcgcaaaaaccaaacgatttagcctttattcgcgtggcctcttattatccggtaacgatgttcagccaggtacggactctaccgcgcggttcggcagacgcgcagtattgcgagctggatgttgtgcctggcgatttgaaccgttatacgcttaccggctgtttaccacagcgcgccgacccgctgccgctggcctttgctattcaggacggcgccagctacgcgggcgcgatcctcaagcaggaactgaaagaggccgggataacttaccgcggcacgctgctgcgccagacgcaggttaacgagcccggaacgatcgtcgccagtaaacagtcggcgccactgcacgatctgcttaagattatgctgaaaaagtcagacaacatgatcgccgatactgtttttcggatgattggtcatgtcaggtttaacgtgcctggcacctggcgggcgggatcggatgccgttcgccagatcctgcgccaacaggcgggaattgatatcggcaataccattattgccgacggttccggtctttctcgccataatctgatcgctcccgccacgatgatgcaggtgctgcaatatatcgcccaacacgataacgagctgaactttatctctatgctgccgctggcgggctatgatggttcattacaataccgcgccgggctgcatcaggcgggcgtagacggtaaggtttcagcgaaaaccggatcactgcagggcgtgtataatctggcgggctttattaccaccgcaagcgggcaacggatggcatttgtacaatatttgtccggctacgcggttccacctgccgatcagcgtaatcgccgaatcccgctggtacgcttcgagagtcggttgtataaggatatttatcagaataactgagtgcatttattgccggatggcggcgctaacgcgtcttatctggcctacaaagaacataataaaacgggccgcaaatgcggcccgttggcttttgtaggccggataagcgtaagcgccatccggctacgagattaacgtttgtagatgaactcgacgccttcttcgtcgtcttcatcccagtcgtcatcccagtcatcgtctgcgtcttcttccacttcagccagctgctggcgatgataatcgtcccacatgaactcgactttttccggctgttttgcttcttcagcctgcgcgatcggattctcgatgataaaggtcatcacatcccagcagagatctttcacccccagctgactggcagcggaaatcagatagtatttcccttcccagcccaacgcttcggcgatcgctttcgctttctcttccgcttcggttttatccatcagatcgatcttgttgaacactaaccagcgcggtttagccgccagatcctggctgtatttttccagttcgccaataatgatacgggcgttttccaccggatcggaaccgtcgatcggatcgatatcaatgaggtgcagcagtacgcggcaacgttcgaggtgcttcaggaagcgaatccccaggcctgcgccttccgccgcgccttcgatcaaccccggaatgtcggccaccacaaaactcttttcgctgtccatacgtaccacgcccaggctcggcaccagcgtggtaaacggatagtccgcgactttcggttttgctgccgataccgcacgaatgaacgttgatttaccagcgtttggcatccccagcatcccgacatccgccagcagcatcagttccagcagcaggtcgcgcttatcgcccggcgtaccattggttttctggcgcggcgtacggttaaccgaggatttaaaacgggtattgcctaacccatgccagccgcccttcgcgaccaacagacgctgaccgtgtttggtcatgtcgcccatcgtttcaccggttccctggtcgataacgcgcgtaccgaccggcactttgatggtcacgtctttaccgcgtttaccggtacagtcgcggctcgcgccattctgaccacgttcagcgcggaacgatttttcaaagcggtaatcgatcagcgtattcaggttttcatcggcttccatccagacgtcgccgccgtcgccgccatcaccgccgtccgggccgcctttcgggatatatttttcgcggcggaagctcacacagccattaccgccatcgcctgcaacgaccagaatcgatgcttcatcaacaaacttcattttattctccgtaaatcattcgcctgagcggggttgcgaaaccaccgtttcatgcttgcgtaaaccgccccaaatacgatgaccaatggcggaatacatcgcgcccgcaaccacgacaaacgcaccgagataacctaaaaggtttaacatcggtctggcgaagaaatcgggccaggccatagataaaagatctgaaaacagcagggtaaatagcggtgtaagcgtgattatcgcgctcacctgcgccgcctgccaacgcgccatcgcttccgccagggcgccatatcctaccagcgtatttagcccgcagaaaatcaaacaggcgagctgccagtcgctcagttgcgctatcaccatcggttttgccagcggcaagagcgctatcgtacataaagtgtacagtaaaaacaggatctgctgcgaggccagacgtcgcaataatactttttgcgccacgccatagctcacccacaccatcgccgcgcctacgccaaaaataacgccccaggtgtagtcggtcagtcgggtaaaaatctcgatcagactggtgttaaaaaacatcaccagcccgctcaataacatcagcgcgccaatcacctgcgtaccgcgcatcttttctttcagaataaagacgctggcgaccatcatgccaaccggcgagagctggccgataacctgcgacgcggttgggcttaaatattgcagggaagaactgaacaaaatgaaattaccgaacagtccgcaggtcgctatcgccaataacaccaaccagcgcggcttacgaaaaatacgcagcggcggcagctttctttttactgccagtatcgccccgaggccaatactggccattaagaagcggtagaagacaatggttgaaggctccatcacctccagcacttgcttcattgctattggcaacgctccccagcacatcgcggtagtgagcgctaaaagaatgccaatgcctgcctgctgcttcatgccgtgttccctgcaaagacccgttaacggcattcgcacagccacacgggtatattttagtcggccatcgaatgtaaaaagccccgcaacaggtgcggggctttcatccgttaccggaccacaaaaaacttactcagcaacgatgctgatgtatttacggtttttcgggcctttaacttcgaatttcactttaccgtctgctttagcaaacagagtgtggtcacgaccgcaaccaacgttggtgccagcgtggaatttagtaccacgttgacgaacgatgatgctgcctgccagaactgcttcaccgccaaagcgttttacgcccagacgtttagcttcagaatcgcgaccgttacgagtcgagccgccagcctttttatgtgccatttaatctgctcccctaatcttaagcgctgatgccggtaattttcacatcagtgaaccactgacgatggccctgctgcttacggtagtgtttacggcgacgaaacttaacgattttaactttctcgccacgaccgtgggcaacaacttcagctttgattacgccgccatcaacgaaaggaacgccgattttgacttcttcaccgtttgcgatcatcagaacttcagcgaactcgatagtttcgccagttgcgatgtccagcttttccaggcgaacggtctgaccttcgcttactcggtgttgtttaccaccactttggaaaaccgcgtacataaaaaactccgcttccgcgcacacctttcaatgattcagagcgcgctataaatattcacaatagggcgcgaatattacgcaaattgcacggctttgacaagtgctaccatcaatacatgaagaaaaaaaacacaacgcatacggtaacgtttatctgcggcgttttttcagtacaatcagggtatatttctaaccataaaccctacgttacctcattcagacatgggataatcggggcgataagcccggcttttgcgatgaatttagaaaaaatcaacgagttaaccgcgcaagatatggcgggtgtcaatgcgacaatccttgaacagcttaattccgacgttcaactgattaatcagctaggatattacattattagcggcggcggaaaacgcattcgtccgatgattgccgttcttgccgcgcgcgcggtgggttatcagggtaacgcgcacgtgactatcgccgctctgatcgagtttatccacacggcgacgctgctacatgatgatgtggtggatgaatccgatatgcgtcgcggcaaagcgacggcaaatgccgctttcggtaatgccgccagcgtgttggtcggcgactttatctatacccgcgccttccagatgatgaccagcctcggctcgttaaaagtgctggaagtgatgtcggaagcggtcaacgtgattgcagaaggcgaagtgctgcaattgatgaacgtgaatgacccggacattaccgaagaaaattacatgcgggtgatttacagtaaaacggcccgtctgttcgaagctgccgcccagtgctccggtattctcgctggttgtacgcctgagcaagagaaagggttgcaggactatggtcgctaccttggtacggctttccagctcattgacgatctgctggattacagtgccgacggcgagcatctcggtaaaaatgtgggtgatgacctcaatgagggcaaacctaccttaccgttgcttcacgccatgcgccacggtacgccagaacagtcagcgatgatccgtaccgctattgaacaaggtaatggccgtcatcttctggaaccggttctggaagcgatgaccacctgcggctcgctggaatggacgcgtcagcgagcggaagaagaagccgacaaagcgatatccgcgttgcagatattgccggataccccatggcgtgaggcgctaatcggtctcgcacacatcgcggtgcagcgcgatcgttaatgccgttctcttatcccgcgtactgcgcgggatatcccattaagttctaataaactccagataccctatcgcctgtttttcacatactcatccaggatttcccctggcatattctgaatattgccgccacttacatgaactttttagaacattccttcacgaagcgttatagtatcgaacgtcgtcgggttgttaaaaccgtaagtgattaatctaaggagtgatggatgtatggaaagcaagcttattgactggcatccggccgatatcattgccggactacgtaaaaaagggacttcaatggccgctgagtcacgtcggaatggattgagttcatccacgctggccaatgcattaacgcgcccatggccgaaaggagagttgattatcgcgaaagcattgggaacggaaccctgggttatttggccatcgcgttatcacgatccgcgcacgcatgagtttatcgacagaacgcggcttatgagagcgcgtaataaaaacaaacagaatgtagagtaagtgcctgtaaaacaacccccgcatcgcgttcgcgggggttgttcagcgtacagaaggttattcgcctttcacgcgttcaatattcgcgcctagcgcgcgcagtttgtcttcgatgcgctcataaccgcgatcgatgtgataaatgcgatccacaatcgtcgtgccttccgcaatacagcccgccagcaccaggctcgcagatgcccgcagatctgtcgccatgacctgggcgccagagagcgtttctacgccatggcatatgacggtattgctttcaatttccgcacgcgcgcccatgcggctgagttcaggcacgtgcataaagcggttttcaaagacggtttcagtgataaagcccgtcccttccgccaccaggttcagcaacgtgaactgcgcctgcatatcggtcgggaatgccgggtgcggcgcggtacggacattgaccgccttcggtcgtttgccgtgcatgtccagactaatccagtcctcgcccacttcgatatccgcgccagcatcgcgcagtttcgccagtaccgcgtccagagtgtccggttgcgcgttacggcagaggattttgccgcgagagatcgctgccgccaccaggaaagtccccgtttcgatacgatccggcagcacacgataaacgccgccgcccagacgctctacaccctcgatcgtaatacgatcggtgccctgcccggcgatcttcgcccccagcgtaaccaggaagttagcggtgtcgacaatttccggctcgcgcgcggcgttttcaatgatggtcgtcccttccgccagcgtagcggcgcacataatggtgacggtcgcgccgacgctgaccttatccatcacgatatgcgcccctttaagacgcccttctacggaggcctttacgtagccctcttccagcttgatggtcgcacccagttgttccagaccggtaatatgcagatcaaccggacgcgcgccgatagtacagccccccggcagagagacttgtccctgaccaaaacgggcaaccagcggccccagcgcccatatcgaggcgcgcatggtcttaaccagatcataaggcgcgcagaacacgttcacctggctggcgtcaatgtgtaccgatccattgcgttccactttcgcgcctaattggctcaggagcttcatcgacgtatccacgtctttcagttttggaacgttttggatctctaccggttcttctgccagcagagcggcgaacaggatcggcagcgcggcgtttttggcgccggaaattgtgacttcgccctggagcgtcgttggcccctgtacacgaaatttatccattattgtattctcagttaagcattcatctccgctaccggcaggttacccgtagcttaaaatccgttaagtttacgatcgcgcgcccattccgccggggtatatgctttgatcgatacggcatggatacggttgtccgcaatgtactccattagcggcccatagaccgtttgctgtttcttgacccggctcatgccgtcaaacatctcgcccacggcaataacctgaaagtgactgccatcgccggagacgtggacttcctggagggagagggcattcatcagcacactctgaatttcatgattttccatgggttctttattcgtcaaatagtgaaaacagcccaacatcttagagcaaagtcgcgccgtcttaaataagcaaaagattacgctgataaatcagcgcggtaaaagtgccggatggtgctgctaacgcaacttatccggcctacggggatcatgcgaagtgtaggccggataaaccatccggcattcattacatacggggaagtacgtcttcgggcaagttatataattgcgccagcgcgtaaaccttgtcgttaacgccagacagcgacacggcattgccctgcttttttgcctggttcacaaggtgcgccagcagcgccagtccccccgtatctaccctggagatctggctcaggtcgatacgggtaacgccattcatcgcttctacgcgcgcgtcccatagcggcgccaacacgtcctgatccagctctcccgccagcaccagagtgtccgcctcacgcgtccaggtgagttgcggcgtcattactgtttctcgtccaaagtaattttctgttgagagatagatttcagttgtgcggtcaggccgtcgatgcctttagtacgcagcaggtcgctccactcattttgcttggtggtgatcatgctgacgccttccgcaatcatgtcatacgcctgccagttgccggtctgggtgttttttcgccactggaaatccaggcgtaccggcggacgaccgttgggatcgataatcgttacacggataggcacaatggtcgcatcgcccagcggttgctcaggcgctatctggtaagtctgaccgtggtacatcgccagcgcctgaccgtatgcctgtttcaggtattcgcgaaacgctgcaaaataggcttcacgctgcgccggggtcgcctctttgtagtagcggcccaacaccagcgcgccggcatattttacctgcacgtacggcagaagttcctgatcaacaacgtctcgcaggtaatccggattggcacgaattttcggctgttcgtttttcaggcgatcaaaagttttctgcgccgcctcgttcatcagtttataaggattgctctgatccgctgccgttgctgcgcttaatggcgcaatgaccagcagggccaccatcatcagtcgtttaaacatgcctcaattctcctgagattatttcgtttcgcccgcgggcgttgtggcttcagtatgaccttccgttgcggctggcgcatcgccagaattcttattgtcgtcgcctttgctgttataaaggaactggccaatcatatcttccagcaccattgcagacttggtgtcctgaatcgtactcccatctttgaggatagacgttcccagctcaggatcttcaaaaccgacgtttaatgccagatattgctcccccagcagtccggaagttcgaatactcaacgagctggtatcgggaatatggttataacgctcttcgatgtcgagcgttacgcgcggcaggtatgttttcggatcaagcgagatatcttcaacccgcccgacaaccaccccgccgatgcgtaccggggaacgcactttcagaccgccgatgttatcgaaggtcgcataaaccttataggtcggctccgtgcgcatagaggtcacatttgccgccttcaggcaaacaaacagcgccgccagcaacgctaccagcaaaaaaacgcctacccaaatttcattttttttcgtttgcatgaactcaattcccaaacatcagtgcggtcagcacaaaatccagccccagaacggccaacgatgcgtgaaccacggtacgcgtcgttgcccggctaatcccggcagaagtcggtattgcgtcataaccgttgaataacgcaatccatgttaccgtaatggcgaacaccacgctctttatcagacagttcaccaggtccatacgccagtcgacggcattctgcatcgcggaccagaagaacccggcgtcgattcccttccagcttacgccgaccagcgagccgccccagataccgaccgccacaaagataatggtcagtagcggcaatgaaatcacgcccgcccaaaagcgcggcgaaatcacccggcgcaatggatcgaccgccatcatctccatactggagagctgctccgtcgcccgcatcaggccgatttccgccgtcaacgccgacccggcccgcccggcaaacagcaacgccgcgaccaccggccccagctcgcgcagcagcgaaagcgccactaacatgccaagactggtctccgcgctgtaagtggtcagaaccagatagccttgcagccccagcaccataccgatgaatacgccggagacaataatgataagcattgacaagacgcccacattataaagctggcgcaccagcagcggcgcatgtttgcgaaactccggcttaccgataatcgcattgaataacattaacccggcgcgcccgaacgtcctgacggttttgatcccgctgtgtccgagtgctgccagcgcatttaacagcatgagtggcttaactccctgtttcgagtaaatcaaggtgatagtcgcccgccggatagcggaacggaaccggcccgtcggcaatgccgtcaaggaactgacgcacgcgcgggtccgtattctcctgcaacgcctgagcgctaccgtgagcgacgatttttttgtccgccatgatccaggcgtgatcagcaatactgagcacctctggcacatcatgcgagaccaccacgcaggtcacgcccagcgcgctgttcaattctgaaatcagcttcaccagaacgcccatggtaatcgggtcctggccgacaaacggctcatcgaacatgatgagatccggttccagagcgatggcgcgcgccaacgcggcgcggcgcgccatcccaccggagagctcggaaggcatcagttttgccgcgccgcgcagcccgacagcttccagtttcatcatcacgacgctttttagcagcggcgcgggtaaattggtgtgctcccgtagcggataggccacattgtcaaacacgttcatgtcggtaaacagcgctcccgactgaaacagcatactcatacgtttgcggacggtgtagagccgcgaacgggacatggccggcacattctcgccatcaaataagatctcgcccttatccggcgggatctgtccgccaatcaggcgcaacagcgtggttttaccgatgcccgacggccccatgatcgccgtgatcttcccgcgcggcaccgtcagggaaatattatcgaaaatgcagcgttcgccacgggaaaagctgacgtcgcgcatatcgactaaattggccgcagactgacccattgattcatccttcgtattgccttgttgaggtaaccatggcgctgaatttaaccatgggttcgacataattacagaatattaactgacagggttagcgaaagctggcattcgttttactttttagccgcataaagtcaaaattaggacttcgttacggcttccagatatcccttccaggggaccggcgagtatacctgaagaaaggactttagatgcttttagcgatggcgctactcataattggtttgcttctggtggcctacggcgccgatcgtctggtgtttgcggcctctattttatgccgtacattcggtattcccccgctgatcatcgggatgacggttgtgagtatcggcacctcgctgccggaaattattgtgtcggccgccgcatcgctacacggtcagctcgatttggccgtcggcgcggcgctcggttctaacatcaccaatattttgctgatcttagggctggcggcgctggttcgtccatttaccgtgcattccgatgttctacgtcgcgaattgccgttaatgttatttgttagcgtggtagccggttccgtactgcatgacggacagttaagccgcagtgatggtatctttctcctgcttctggctgtgctatggctgttattcattgttaaaatcgcgcgtctggccgaacgccaggggaatgacagcctcacccgcgaacaactggcggagctgccgcgcgaaggcgggctccccgtcgcgttcttatggctgggcattgcgctggtcatcatgccgatggcgacgcgcatggtaatcgataacgctacggtgctggcgaactatttcgccatgagtgaattaacgctcggtctgacagtcatcgccgtcggcaccagtctgccagagctggcgacggcgattgccggcgtgcgaaaaggcgaaaatgatattgccgttggtaatctcattggcgccaatatttttaatctcgctatcgtgctgggactgcctgcgctgatcgcgccgggggagatcaatccgctggcgtttgggcgtgattatagcgtgatgttgctggttagcgtggttttcgctttactttgctggcggcatccgcgtcagattggtcggggcgcaggtatactgctgaccggcgggtttatcgtatggctggcgatgctctattggctatcgccacttcttgttggataactggaaacggattatgtcgcatttagcgttgcaaccggggtttgactttcagcaggcaggcaaagaggtcctggaaattgaacgtgaaggcctggcggagcttgatcaatatatcaaccagcatttcacgctggcctgtgaaaaaatgttcaactgcaccggaaaagtggtggtcatggggatggggaaatccggccatatcggacggaaaatggccgccacgttcgccagtaccggcacctcttccttttttgtacatccgggcgaagccgcgcacggcgatttggggatggttacgccgcaggatgtggttatcgctatctccaactccggcgaatccagcgagatcgcggcgctaataccggtacttaaacgtctgcacgtgccgttaatttgcattaccgggcgaccggaaagcagcatggcgcgtgcggcagatgtgcatctgtgtgttaaagtgcccaaagaagcgtgtccgttaggactggcgcctaccagtagtaccaccgcaacgctggtgatgggcgacgcgctcgctgtggcgttgttaaaagcgcgcggctttaccgccgaggatttcgctctgtcgcatcctggcggcgcgctgggacgtaagctactgctgcgcgtaagcgatattatgcatactggcgatgagatcccgcatgttaataaacatgccaccctgcgtgatgcgctattagaaattacgcgtaaaaatctcggtatgaccgtcatttgcgatgaatccatgaagatcgacggtatcttcaccgacggcgatttacgtcgcgtattcgatatgggcggcgatatgcgccagttggggatcgccgaggtgatgacgccagggggcattcgcgtgcgtcccggtattctcgctgtcgatgcgctgaatttaatgcagtcccgccatatcacctccgtactggttgctgatggcgaccagttactcggtgtgttacatatgcatgatctcctgcgtgcaggcgtcgtgtagaaactcaaggataattaacgatgagtaaagcaggtgcgtcgcttgcgacctgttatggccccgtcagcccccatgtcatgaccaaagcggagaatatccgcctgctcatcctggacgtggatggcgtattgtctgacggcctgatttatatgggcaataacggcgaagagctgaaggctttcaacgttcgtgacggctatggtattcgctgtgctttgacctccaatatcgaggttgccattattaccggacgaaaggctaaacttgtagaagatcgctgcgccacgctggggattgtccatctttatcagggacagtcgaataagttgatcgcctttagcgatctgctggaaaaactggccattgcgccggaaaatgttgcctatgtcggcgatgatctgattgactggccagtgatggaaaaagtggggttaagcgttgccgttgcggatgcgcatccactgctgatcccccgcgctgactatgtgacgcacattgccggcgggcgcggcgcggtacgtgaggtgtgcgatttgctgctgctggcgcagggcaagctggatgaggccaaagggcaatcgatatgagtaaaaccagacgttgggttatcattctactgtcgctggccattctggtactgattggtatcaatctggcggataaagacgatcctgctgccgtgatggtcaacagcaacgatcccacgtataaaagcgagcatacggataccgtcgtgtacagtccggaaggcgcgttgagctatcgtctgatcgcgcagcacgttgaatatttttccgatcaggcggtctcatggtttacgcaaccggtattaaccacctttgataaggataaagtgccgacatggtcgatcaaggccgataaagccaaattgactaacgatcggatgctctatctgtatggccatgttgaagtcaacgccctggtgcctgacgctcaattacgcagaattaccaccgataacgcgcagattaatctggtgacgcaggatgttacctcgaacgatctggtgacgttatacggcacaacatttaactccagcggactgaaaatgcgcggtaacttacgcagcaagaacgccgagctgattgaaaaggttagaacctcttatgaaattcaaaacaaacaaactcagccttaatcttatgcttgccggctcgctgctggccgccagcattccggctttcgccgtcacgggcgataccgaacagcctattcatattgactcggatcaacagtcgctggatatgcaaggcaacgtcgtgacctttacgggcaacgtggtgatgacccagggcacgattaagatcaacgccgataaagtcgtggttacccgccctggcggcgaacaggggaaagaggtgatcgacggttacggcaatccggccaccttctaccagatgcaggacaacggtaagccggtgaaaggccacgcttcccatatgcactacgagctggcgaaagattttgtggtgctgaccggcaacgcttatctggagcagcttgacagcaacattaccggcgacaaaatcacctacctggtgaaagagcagaaaatgcaggccttcagcgagaaaggcaaacgcgtcaccaccgttctggtgccgtcgcagttgcaagacaaaaacaaaggccagactccggcgcaaaagaagagtaactaattcgttatggcaacattaactgcaaagaatctggcgaaggcctataaaggccgtcgcgtagtggaagatgtcagtctgaccgttaactccggggagattgtcgggctgctcggtccaaacggcgcgggtaaaaccaccaccttttatatggtcgtcggtatcgtgccgcgtgacgcaggcaatatcatcatcgatgatgaagatatcagtctgctgccgctgcacgcgcgcgcgcgccgcggtatcggctatttgccgcaggaagcctctattttccgccgtctcagcgtatttgataacctgatggcggtactgcaaattcgtgacgatttgaccgcagaacagcgagaagaccgcgccaacgagctgatggaagagtttcatatcgagcatctgcgcgacagcatgggacaggcgctgtccggtggtgaacgccgtcgtgtagaaatagcccgcgcgttggccgctaatcccaaatttatcctgctggatgaaccctttgccggcgttgacccgatttccgttatcgacatcaaacgcattatcgagcatctgcgcgatagcgggctcggcgtgctgatcaccgatcataacgtccgtgagacgctggcagtctgtgaacgcgcctatatcgtgagccagggccaccttattgcccacggtacgccgacagaaatcctgcaagacgaacacgttaagcgtgtatatcttggggaagacttcagactctgatagggtagagggctatgctgctctagcgggagaaaacgactctgaatatgaagcaaggtttgcaactcaggcttagccaacaactggcaatgacgcctcagctacaacaggccatccgtctgttgcagttgtctacgctggaacttcagcaggaactccagcaagcgctggaaaataacccgctgcttgagcaaaccgatcttcatgacgaaatcgacacccagcaacctcaggataacgatcctctcgataccgccgacgcgctcgaacaaaaagagatgccggaagagctgccgcttgacgccagttgggatgaaatttacaccgccgggacgccgtccggccccagcggcgattatatcgacgatgagctgcccgtctatcagggcgaaacgacgcagtcgttgcaggattatctgatgtggcaggttgagctaacgcccttctcggataccgatcgcgctattgcgacatccattgtcgacgcggtagatgataccggctatctcaccgtatccctggacgaaattcgcgaaagcatgggcgatgtagaggtggatctcgatgaggttgaagccgttctgaagcgcattcagcgttttgatccggtaggcgtcgcggcaaaagatcttcgcgactgtctgctgatccagctttcacaattcgacaaatccacgccgtggctggaagaggcgcggctcattatctgcgatcatcttgatctgctggccaaccacgatttccgcacgttgatgcgcgttacccgactaaaagaagaggtgctgaaagaggcggtaaacctgattcagtcgctcgatcccagacccggtcaatcgatccagaccggcgagccggagtacgttatcccggatgtgctggtacgcaagcataacggtcgctggacggtggagcttaatagcgacagtattccccgtttacagattaaccagcactatgccgccatgtgcaatagcgcgcgcaacgatgccgacagccagttcatccgcagtaatttacaggatgcgaaatggctgataaaaagccttgaaagccgtaacgacacgctgctgcgcgtcagtcgctgcatcgtcgagcaacagcaagccttttttgaacagggcgaagaatatatgaaaccgatggtactggcggatatcgcccaggccgtcgagatgcacgaatccaccatatcccgcgtgaccacgcagaagtatctgcacagcccgcgcggtatttttgaactcaaatatttcttttccagccacgtcaataccgaaggcggaggcgaagcctcttccaccgcgattcgcgcgctggtgaagaagttaattgcggcggaaaaccccgcgaaaccactgagcgacagcaagttaacctctctgctgtcagaacaaggtatcatggtggcgcgccgcactgttgcgaagtaccgagagtctttatccattccgccgtcaaaccaacgcaaacagctggtttgacccaaccgataaggaagacactatgcagctcaatatcaccggacataatgtcgaaattactgaagccctgcgtgaatttgtgacgacaaaattcgccaaacttgaacagtattttgagcggattaatcaggtatacgtggtgttgaaagtggagaaggtcacgcacatctcggatgcgacgctacacgttaacggcggcgaaattcacgccagcgcggaaggccaagatatgtatgccgccattgacggcttgattgataaactggcaaggcagttaaccaggcataaagataaactgaaacaacactaattgtccgggcagttagccagtgcaggacggcctgttgtgtgacacaacgggccatttgtacagttagcgctccgaacctggccatcaacctgacaggacaggttcttaggtgaaattatgataaataacgatacgactctacaactgagcagtgtacttaaccaggagtgtacgcgtagcggcgttcattgtcagagtaagaaacgcgcgctggaaatcatcagcgaactggcggcaaaacagctcagtttacctcctcaggtcgtgtttgaagccattctgacacgcgaaaaaatgggcagtaccggtattggtaatggtatcgccatcccgcacgggaaactggaagaagataccttacgcgccgtcggcgtgttcgttcagctcgaaacgccgatcgcgttcgacgccatcgataaccagccggtcgatctcctcttcgccctgctggtgcccgccgatcaaactaaaacgcatctgcacacgctgtcgctggtggcgaaacgtctggcggataaaacgatctgccgccgcctgcgcgcggcgctgaatgatgaagagctgtatcaaatcattactgacaccgaaggtgagcagaatgaggcataacaactcaatggcatttatttctgtcgttgtgaggagaaacggtacatggtactgatgatcgtcagcgggcgttccggatcaggtaaatctgtcgctctgcgcgcgctggaagatatgggattttactgcgtggataacctccccgtcgtgctgttgcccgatctggcgcgaacgctggccgatcgccagatttccgccgccgtcagcattgatgtgcgcaatatgcctgaatcacctgagatttttgaacaggcgatgaataatctgcctggtgctttctcgccgcaattgctgtttcttgatgccgaccgcaataccttgattcgccgctacagcgacacgcgccgtttgcatccgctttccagcaaaaatctttctttagagagtgcgatcgataaagagagtgacttgctggagccgttacgctcacgtgcggatctgatcgtcgacacttcagaaatgtccgtccatgagctggcggagatgctgcgtacccggctgttgggcaaacgcgagcgtgaactgacgatggtatttgagtccttcggctttaaacatggtatcccgattgatgcggactatgtgttcgatgtccgctttctgcccaacccgcactgggacccaaaactgcgccccatgaccgggcttgataagccggtagccgcgtttcttgaccgacacacagaagttcacaattttatctatcagactcgcagctatcttgagctatggttaccgatgctggagaccaacaaccgcagctaccttaccgtcgctatcggttgtaccggcgggaaacaccgttcggtgtatattgcagaacagctggcagactacttccgctcgcgcggtaaaaatgtccagtctcgccatcgcacgctggaaaaacgcaaaacatgaccgtaaagcaaactgttgaagtcaccaataagctgggcatgcatgcccggcctgccatgaagcttttcgaactgatgcagggttttgacgccgaggtgctattacgcaatgacgaaggcaccgaagcggaagcaaacagcgtcatcgcgctgttaatgctcgactccgccaaagggcgtcagattgaaattgaagccaccggcccgcaagaagttgaagcgctggcggcggttatcgcgctgttcaattccggctttgacgaagactaaacccccccctctataccctatttcccccaacgccgtcccggtatttgatgacagtcaccccaaaaccgggcgtgttacgcctgcctgcctcttgtcccgcagccccaccctttcgtaagatttgtacatttcgtgcgctttacctatgcataaaaacattaagaaaaccttaaaaaatttcgtttaggttttgtttaagttctttgtccatactaaatttatgtgaataaatttttccaggacttgccatgatcctcttatcgaaacagactccgctgggcgccggtcgacatcgtaaatgctatacgcatccggataatgcccggcgttgcataaaagtcatttacaaccgtgaccacggcggtgataaagagattcggcgtgaactgagctactatgcgcatctgtcccgctacctgacagactggagcgctatcccccgttattacggcacggtagaaaccgattgcggcaccggctatgtctacgacatgattaccgatttcaacggcgcgccctctattaccctgaccgagttcgccgcgcaatgtcgttatgaagaggatgtcgctgtcctgcggcggctactgaaaaaactgaaacgctacctgctggataaccatattgtgacgatgtcgctgaagccgcaaaacatcctgtgccagcgtatcagcgagtcagaagtggttccggtggtttgcgacaatctgggggaaagtacctttatcccgctggcaacctggtcaacatggtgctgtgaacgcaaactggagagagtgtggcagcggtttatcgcccagcctgcgctggccgttgccctggagagggacgcgcagccaaaagacaagaaacggctggcgcttacttctcacgaagcttaatggcctgtgcttatcaggcccggacgacacagatcgcaggccggataaggcgttcgcgccgccattcgacaaaattaattaagctggttgcgcgtcataaaagattccccacccagttggcgcatctggcgcataatccacgcctgccggctacgcacatagccggaaggcgcattcgccttatagcgaatcgggttaggcagcacagccgccagtaacgcggcttcagacagactcaagcgactggcaggtttatgaaaataccgttgtgccgcagcctccacgccgaaaataccatcgccaaactccgcgatattcagataaaccgtgaggatgcgctttttgctccagacagtttcaatgcccagcgttagcccggcctccagacctttgcgcacccaactgcgtccatcccataaaaagagatttttcgccgtttgctgcgaaagcgtagaggcgccgcgaatacggctctcattccgctcattatgcgccagcgctttttcaatcgccggaacatcaaagccccagtgctcagggaacttctggtcttccgccgcaattaccgccagccccatccacggcgagatatccgccatactgacccagtcagaatgcgccacataaccgaactctccgccaagccaggcgctaatctgccgttccgccatcaccgccgaaaaaggcaccggaaccacgctaaacagcgcaatgccgccgccccaaaagacggcgagcgcagcaaggatacgtaaaagtagacggcgcaaaaacgttaacggcgcgatgcgtcgtttgctcattccgccagaaccagcacgcgcgacactaatttatcaatgccgcttgccgcctgggcgatatcctgcgccagcatataggcaggggtggtcacgaccttgttatcctcgtccacaacgatatcatcaaccgggcaaggtacgtgttcggcgcccatctcttcaagtacttcagcggtatcaatatccgtccctattgtcagacgtagcgggaagtcaaagattttcggcaacattgcgggcgcgatacagatgaatcccagcggcttgccggactggtgcatggccttcgccagcgcgacgacatcgctatccacccggcattcgctcccctggctggcgaaattactcaggttcttcgccgcgccgaaaccaccaggcacaatgagcgcatccagctcctctggctgagcctgggacaggggacgaatatcgccccgcgtaatacgcgccgcctcaatcaggacgttacgcgtttccgccatcgcttcgccggtcaggtgattaataacatccgcttgtggtttatccggcgcgaagcagacagcctgcgcgccgctgcgggcaatggccagcagcgtcagaacggcctcatgaatttcggtgccgtcatagacgccgcatccgctgagcactacgccaatttttttcatggtgaacatcctcctgcaaccgactcaagcccattaataattttgattaaaatgctacgcttcacacatttaaatgattcatgtaacaaatcatttaggatttgctatcttaactgcgtgcggcctgaaaacaggactgcgcctttgacatcatcataataagcacggcgcagccacgatttccctggtgttggcgcagtattcgcgcaccccggtcaaaccggggtcattttttttccgcgtttgccacccaggctttcagcaccgcgacatcgtgctgccactcctgcttcatctcttcaatccattccgcgacattatcttcccaggcgggaagatccggcgactggatttgctggccaagttgttgcagatgacgcagccctaccgaaccggcggcgcctttaatcttatgcccttcctcaacaacgccttttttgtcacgcgccgttagattggactccagcacgcttaaatagccaggcatcattttttcaaacaccgcgagaccgtcggtgatcaatttaggcccaaccaactcgatgtattgttccagcatcgggatatccagcagcgcttgcgctttatcgctctcttcaggcgtcacggtactctcctctttatcggtggcatcccagaattttttaatcatcgcggttaaggccggcaccgacagcggcttactcagcacatcgtccataccagcgtccagatactcttttttatctttcagaacgttagccgtaagcgctaccagcggcggtaaatcttcccgcgtgtggcgacgggtcagttctctggcgatatccagacccgtcatatccggtagctgaatatccagtaagaccaggtcgtattctcccggcacgaacatctccagcgccgccttgccggtcatcgcgacatccacgctgttccccagtttttccagtaccgaacgcgccacgatcacgttcagttcaatatcttcgaccagcagaacatgcagcgcgggcagcggcatgtcgtcttcatcaaaggcgtcctccacctcttccgccaccgctggcgcatgaaccgttagcgtaaaggtcgatcctttgcccggcagactggaaacggtaatatcgccgcccatatttttcgccagccgacgggagaccgccagcccgataccggtccccgtcgccggtttgccgccgttactgtctttcacctgataatacatggcgaaaattttatcctgctcatcctgcggaatgccgatcccggaatcttccacttcaaagtgcagcatgtcgccttcatcatagcgcgcccgcaccgtcacctggccctgctgagtaaacttcaccgcattgctgatcaaattccataaaatctggcgcagacgcgttccgtcggtaatgactttgtgcggcaacggcagcgtcggctcaagcacaaaacgtagccctttttgctgcgcctgcaaaccggaaaggttttccagatcggccataaagctggtgaaatcaatgggttggttatcaagctgaaccttacgccgctccatcttatccatatcaatgatatcattgaaaatattgcctaacgtcacggcggagacatggattgtcttaaggtatttttcctgttcggcggtgagatcggtatccagcaggatgcggcttaaaccgacgatgccgttaagcggggtgcgcagctcatgactgatggtagagataaacgtggtcttgtcgcggctggcgcgctccagcgcgtcctgataacgcttacgttcggtaatatcacgaccaaatcccatcaggccatgacgtttaccgacacggtcgtaataaggcactttacgaatttcaaagcaggcctttcgtccgtccgggtaatccagccactgttcgtaggtcagggagacgttatggcggaatactttttcgtcggtttcaatgactttctccgccgcttcgggagagtacacatcttccggcttcaaatgcaccagctgtttttcgctcttgccggttagcaattccattgcgcggttacagccggaaaattctttatcctcattacgataaaaaaccaaatccggcgaggcgtccagaaaggagcgcagaaaagaggattgctgttctagctggatttgcgcttcttcacgctctttaatttctacttttagctgttcaaatgtctcttgcagctccgcttccgctttttcgcgatcggcaatttcctgattaagctgggcaatattgtccttcaactgtacgttaagcttgagatcgcgctcgcgcatctcctccagcttttgcaccagacgcgacagtcgctgccttgactcttccagttgttcaacaacaacggataagaaatagaccgcccagggcgtaattaacaggccaaaaaagatggaacgaataacgtcgatactttcaacctgaccatgcagcaccatggtcaccgccatctgcacgacaatcgccagcaccaccaatgccaacgccaggagcatggaaaagcgcaccagacccaatttcatcatcaggtcgacatagtattgcgccagcatacgaatttgcttcatagaggattccttcaccacaacttcgcacataatacccaattatgggaaccgcgttgaatattgtgcgaaatatgcgtagcgcccctcatcacgctacgctacaggtggtatccagggacgggccagcgcagagccctgtacgccatgctcattcaggtatttgtccagctcaaccatccccgtccagcgattctcgcaccacagcggggcaagcagcgtcggacggcgagcgctggctgaaattcggtgataaattacctccggcggcgtatgacgaatcatctcacctgccgttagcgtgtagtcgtccagttcgatgccgttcagccgccccgcttcccaggctttggccatcgtactgcctttcacaatatgcagcggatgcagtttaataccatcaacgcccgtctccaccacacgctccatggtttgcaggcattctgcctgcccttcgcccggcagccccacaatcagatgcgcacacactttcagcccgcgctcccgggcaatccgggtggtacgctgatagcaggcgaagtcatgcccgcggttaattcggcgcagggttttatcgtgtgcggtttgcaatcccagttccagccacacctcgtagccttgatctttatattcacacagtaaatctactactgcctgcgggacgcaatccggacgcgtaccgacgcataacccgacgatactggcctggctgaccgcctgttgatacatggaacgcagcacctgcacttctgcaaaggtgctggtgtaggcctggaaataggccagatagcgtttagcgcggttcaccagatgcgcctgatgcgcaagctgctcggcaatcgaatgatgctgctgcgcctcatcggcaaaagaggcgacattacagaaggtgcaaccgccacgcccgatggtgccgtcgcgattagggcagctaaaaccgccatgaagcgtcagcttatgaaccttttgcccataccgacgtaaaagatccccaccaaacatattgactaatttctgtaactgcataatctgatagaccgcctcttaaaaagaggccaaagcctgccatttttagtctcctttggcgatgacctggatcaatcgtcccggaaggcttttatccattgcataatcaagcaaaataaacgatatttcattcataatcccgctgatgatttttcctgatattcccctcttttttcagcgtttgctgggtcatcgataaaaacagtagcattcaatactgctcacgcttaaaacagcataaaatgccaagatttttgaaaaagcaaggtcagataatgcctggcgagcggctcttatagtgagacagatcacaggctttctgccgctccgtattagcagcccttctataaaaaaccttttaatttcaaaagattcaaaaagttatctgtgctacagcacacttttgcataaatcagtttgccatttgacctgggtgtggattcccgataagttggggatccgctggaagctttctggatgagccgtctgctcatcatatttatgcagtaattgagattccctcttaaccgtatttaccaatgcgcaaaggacacaaagagggcgaatgcgaggtaagcgtatgatgcgccagccccgtcgccatgctcttgctgtgcccgcgcgccgtcggttgggagagcgtcccgtagagcctggggaggttcactgatatgttgtacgataaatcccttgagaaggataactgtggtttcggcctgatcgcccacatagaaggcgaacctagccacaaggtagtgcgtaccgccatacacgcgctggcccggatgcagcaccgtggcgcgatccttgccgacggtaaaaccggcgacggttgcggcttgctgttacaaaaacctgaccgtttctttcgcatcgtggccgaagagcgcggctggcgcttagccaaaaactacgccgtcgggatgatatttttgaataaagatcctgaactggccgccgcgtcacgccatattgtcgaagaagaattacagcaggaaaccctgtcgattgtcggctggcgcgatgtgccaaccaatgaaggcgtgctcggtgaaatcgccctctcctccctgccgcgtattgagcagatttttgtcaacgctccggcgggctggcgtccgcgtgatatggagcgccgtctgtttatcgcccgccgacgcattgaaaaacgcctgcaggacgacaaagatttctacgtatgcagcctgtcgaacctggtcaacatttataaaggtctatgtatgccggcggatctgccgcgcttctacctggatcttgcggatctgcgtctggaatcggccatctgcctgttccaccagcgcttttccactaacaccgtgccgcgttggccgctggcgcagccgttccgctacctggcgcataacggcgagattaacactatcaccggcaaccgccagtgggcgcgcgcccgtacctataaattccagacgccgctgatcccggatttacagtccgctgcgccgtttgttaacgaaaccggttcggattccagctcgctggacaacatgctggaactgctgctggcaggcgggatggacatcatccgcgccatgcgcctgttggtaccgcccgcctggcagaacaaccccgatatggaccaggatctgcgcgccttctttgactttaactccatgcatatggagccgtgggacggtccggcaggcatcgtgatgtccgacgggcgcttcgccgcctgtaaccttgaccgtaacggcctgcgcccggcacgctatgtcattaccaaagataagctgatcacctgcgcctccgaagtcggtatctgggactatcagccggatgaagtggtcgagaaaggccgcgtcggcccaggcgagctgatggtgatcgacacccgcggcggacgtattctgcattccgcggaaaccgatgacgacctgaaaagccgccatccatataaagagtggatggagaaaaacgtccgccgcctggtgccgtttgaagagctgcctgatgaagaagtcggtagccgcgaactggacgatgacctgctcgccagctatcaaaaacagtttaactacagcgccgaagagctggactcggttatccgcgttttgggcgaaaacggccaggaagccgtcggttcaatgggcgacgataccccctttgccgtgctctccagccagccgcgtattatttacgactacttccgccagcagttcgcgcaggtcactaacccgcctatcgacccgctgcgtgaagcgcacgtcatgtcgctcgccaccagcatcggtcgcgaaatgaacgtcttctgcgaagcggaaggtcaggcccatcgcctgagttttaaatcgccaattctgctgtactccgatttcaaacagctcaccaccatgaaagaggagcattatcgcgctgaccgtctggatatcaccttcgacgtgaccgaaaccacactgaacgcgacggttaaggcgctgtgcgataaagcggaacagatggtgcgcaacggcaccgtgctgctggtcctctcggatcgcaatatcggtaagaatcgcctgccggtccccgcgccgatggcggtgggcgcggtgcaaacgcgtctggtagaacaaagcctgcgctgcgacgccaacatcatcgtagaaaccggaagcgcccgcgatccgcatcactttgcggtactgctcggctttggcgcaacggctatctatccgtacctggcctacgaaacgctggggcgtctgattgatacccaggccatcgccaaaaactaccgtaccgtgatgcagaactaccgtaacggcatcaacaaggggctgtacaagattatgtccaaaatgggcatttcgaccattgcctcttaccgctgctccaaactgtttgaagcggtcggactgcacgatgatgtggtaaacctgtgcttccagggcgtggtcagccgtatcggcggcgcgagctttgatgacttccagcaggatctgctgaatctctccaaacgcgcctggctggcgcgcaaacccattagcccgggcggcctgctgaagtacgtccacggcggcgaatatcacgcctataacccggatgtcgtgcgtaccctgcaacaggcggtacagagcggcgagtacagcgattatcaggaatacgccaaactggtcaatgagcgtccggcgtcaacgctgcgcgatctgctggcgatacatccagacggcgaggcggtgactatcgacgaggttgagcccgccagtgagctgtttaaacgctttgataccgcagccatgtctatcggcgcattaagtccggaagcgcacgaagcgctggcggaagcgatgaacagcctcggcggcaactccaactccggcgaaggcggcgaagacccggcgcgctatggcaccaataaagtgtcgcgcatcaagcaggtggcttccggccgctttggcgtgacgccagcctacctggtcaatgccgatgtgattcagattaaagtcgcgcagggcgcgaaaccgggcgaaggcggtcagttgccgggggataaagtcactccgtatatcgctaaactgcgctattcagtgccgggcgtgacgctgatctccccgccaccgcaccacgatatctactctatcgaggacttagcgcagctcattttcgatctcaagcaggtcaacccgaaggcgatgatctccgtgaagctggtatccgaaccgggcgtcggcaccatcgcgaccggcgtggcgaaagcctatgcggatctgatcactatcgccggctacgacggcggtaccggcgccagcccgctctcttcagtgaaatacgctggttgcccgtgggaactcggacttgttgaaacccagcaggcgctggtcgccaacggtctgcgtcacaagattcgtctgcaggtggacggcggtctgaaaaccggcgtcgacatcattaaagcggcgattctcggtgcggaaagtttcggcttcggcaccggcccgatggtggcgctgggctgtaaatacctgcgtatctgccacctgaataactgcgcaaccggcgtagcaactcaggatgacaagctgcgtaagaaccactatcacggcctgccgttcaaagtgactaactactttgaatttatcgcccgcgaagtgcgcgagctgatggcttcgcttggcgtgacccgcctggtggatttgattggccgcaccgacctgctgaaagagctggagggcttcaccgctaaacagcagaagctggcgctgtctcgtctactggaaaccgctgaacctcatccgggtaaagcgctgtactgcaccgagaataacccgccgtttgataacggcgtgctgaatgcgcaactgttgcagcaggcgaaaccgtttgtcgatgcgcgccagagcaaaaccttctggttcgacatccgcaacaccgatcgttccgtcggcgcgtcgctttccggctacatcgcacagacccacggcgatcaggggctggcttccgatccgattaaagcacacttcagcggtaccgcaggccagagctttggcgtgtggaacgcgggcggcgtagagttatatctgactggcgatgccaacgactatgtcggtaaaggtatggcaggcggtttgattgccatcagaccaccggtaggttccgccttcctcagtcataaagccagcattatcggcaacacctgcctgtatggagccaccggtggccgtctgtacgcggcgggccgcgcgggcgaacgtttcggcgtgcgtaactccggggcgattaccgtagtagagggcatcggcgacaacggctgtgaatacatgaccggcggcatcgtctgcgtgttgggtaaaaccggcgttaacttcggcgcggggatgaccggcggcttcgcctatgtgctggacgaagatggcgaattccgtaaacgcgtgaacccggaactggtagaagtactggacgttgattcgctggctatccacgaagagcatctgcgcggtctgatcaccgagcacgtgcagcatactggttcgcaacgcggcgaagagatcctgtccaggtggtcaagcttctcaacccaattcgcgttagttaagcccaagtccagcgatgtcaaagccctgttgggccaccgtagtcgtagtgcggcagaattgcgcgtgcaggcgcagtaaggaattgaaatgagccagaatgtttatcaatttatcgacctgcagcgcgttgatccgccgaagaaaccgctgaagatccgtaagatcgaatttgttgaaatctacgaaccgttttctgaaggtcaggcgaaagctcaggcggatcgctgtttgtcctgcggtaacccctactgcgagtggaaatgtccggtacataactacatcccgaactggctgaaactggctaacgaagggcgtatttttgaggcggctgagctatcgcaccagaccaacaccctgccggaagtgtgtggccgcgtctgcccgcaggaccgcctgtgcgaaggctcctgtacgctgcacgatgagttcggcgcagtgaccatcggtaacattgagcgctatatcaacgataaagcgttcgaaatgggctggcgcccggatatcaccggcgtgcgccagacggacaaacgggtagcgattatcggcgcaggtccggcagggctggcgtgcgccgacgtgctgacccgcaacggcgtgaaggcggtggtctttgatcgccatccggaaatcggcggcctgctgaccttcggtattccagctttcaaactggaaaaagaggtgatgacccgccgtcgcgagatcttcaccggcatgggtattgagttcaaacttaataccgaagtgggtcgtgatgtacagcttgaagatctgctgaaagattacgatgcggtattccttggcgtcggcacctatcagtcgatgcgcggcgggctggaaaatgaagatgcggacggggttttcgacgctttgccgttcctgatcgccaatacgaagcagatcatggggtttggcgaaaccagcgacgaaccatatgtcagcatggaaggcaaacgcgtggtggtgctgggcggcggcgataccgcaatggactgcgtacgcacttccatacgccagggcgcaacgcacgtaacctgtgcttatcgtcgtgatgaagagaacatgccgggttccagacgcgaagtgaagaacgcgcgcgaggaaggtgtcgaatttcagtttaacgttcaaccgctgggcattgaagtcaatgccaacggcaaagtgagcggcgtaaaaatggtgcgcactgaaatgggcgaaccggatgccaaaggccgtcggcgggcagagatcgtcgccggttccgagcatgtggttccagctgatgcggtggtgatggcatttggttttcgtccacacagcatggaatggctggcgaaacacagcgtggaactggactcgcagggacgaattatcgcgccggaacgcagcgataatgctttccagaccagcaacccgaaaatcttcgccggtggcgacatcgtgcgcggttccgatctggtggtgacggcgattgccgaaggccgtaaggcggctgacgggattatgaactacctcgaagtgtaacccttccggctccccgcttactgccttggctgatggctggggagccgatattcctctcctcaatatctctcctgccgattctggaaacccgctcgtaaatcgagatgtaatgccatgtaaaatccgctcatggattgatccgtttacgcctgaagcgtattgatagcgttctaatttcacaatgaaactatcacgtaagggatgacatgacgaatccaactttagcgccacagtctgatgaatatcagcaaatccataacggaattgttcaactgctggacacagcgcggacacaaaccgttcgcagcatcaacaccatcatgacagcaacctattgggaaatgggtcgacgcattgttgaatttgaacaaggcggtgaagccagagcggcttatggtgaacagctaattgatcgtttatcacaggatttaagccaaagatataaacgaggtttttctgccagtaatctatggcaatttaaaaagttttatctttattttcaaaaaattgagattctccagacagtgtctggagaatctctccatttggcgcaactggctaaatctttcccactcccctggtcggcgtatgtccgcctcttgtcggtaaaaaatcccaatgcccgcactttttacgagaaagagacgctacgtaacggctggtccgtacggcaactcgatcggcaaatcgccactcaattttacgaacgaacgctactgtcccacgacaaatccgccatgttgcagcagcctgcacccgccgagccaaacgttttgccggagcaagccatacgcgacccgttcattctggaatttcttaacctgaaggacgagtattccgaatcagacctcgaagacgcgctgctcagccacctgatggactttatgctggagctcggtgacgattttgcttttgttggccgccaacgccgactacgcatagacgatagctggttccgcgtcgacctgctgttcttccatcgtcgcttgcgctgcctgttgctcgttgacctgaaggtaggcaaattcggttatgcggatgccgggcagatgaatatgtacctgaactatgccaaagagcactggacaatgcccggagaaaacccgccagtcggcttagttttgtgcgcagggaaaggcgcgggggaagcacattacgcgctgactggcctgccaaacaccatcatggcgagcgagtacaaagtgcagttgcccgacgaaaaattactcacagacgaacttattcgttcgcaaaccatgctggaaactcaactcacacgcggtggttcactgacaacggagaaaaactaacgaaccattaatgccatgaataattatcaaaaaaaatatcacacgaaaacgtttgctttattctggaaactgtatattatgcggcggattttttgggcaaaattcatggaggcgttgtgtcgcaggacaacaattatagccagggccccgtccctctggctgcgcggaagggcgtgattccactgacgtttgtcatgttgggtttaacgtttttttccgccagtatgtggaccggagggacactcggcaccggtctttcttataatgatttcttcctcgcagttctcttcggtaatctcctcctcggtatctacactgcatttcttggttacatcggcgcaaaaaccggactctccacccacctccttgcacgttactcctttggcgttaaaggctcatggcttccctcgctactgctaggcggtactcaagtgggctggtttggcgttggcgtagcgatgttcgctattccggtcagtaaagcgacgggcattgatgccaatattctgattgccgtttcgggtctactgatgaccctgaccatttttttcggcatctcggcgctgaccattttgtctatcgttgccgtacccgcgatcgttattctgggcagctactccgtctggctggcggtcagcggcgtgggtgggctggagcatttaaaaacgatagtgccgcagacgccgctggatttttccagcgcgctggcgctggtggtgggctcgtttgtcagcgccggtacattgaccgccgacttcgtccgcttcgggcgtcatgccaaaagcgccgtactgattgcgatggtcgcttttttcctcggcaactcgctgatgtttatctttggcgcggcaggcgctgccgccgtcggtcaggcggatatctctgacgtgatgatagcgcaggggctgctgctgcccgcgattgtggtgcttggcctgaatatctggaccaccaacgataacgcgctgtacgcatcgggtctgggcttcgccaatattaccggtctttccagccgtacgctgtcggtggtgaacgggattatcggtaccgtgtgcgcgctgtggctttacaataattttgtcggctggctgacgttcctgtcatctgccatcccaccgattggcggagtgattattgccgactatctgttgaaccgccgccgctatgccgacttcaacaccgtgcgctttattcccgttaactggattgctattctttccgtcgcgctgggcatcgccgccggacattatgttccgggtattgtgcccgtcaacgccgtactcggcggcgtcttcagctatatcctgctgaatccacttttcaaccgcagccttgctaaatcaccagaggtcagccatgcagaacaataacatcaccattcgtcagacgcgtctgcagggacacgaaggattatggcagattacgattgaaaacgggcgctttagccggattgagcctcaggaagccgcatcgttaccgcagggcgaagtgcttgatgccgaaggcggtctggctattccaccgtttgttgagccacatatccacctggataccacgcaaacggcgggtgaaccgagctggaaccagtccggcacactgtttgaagggattgagcgctgggcagaacgtaaagcaatgctcacgcatgaagatgtgaaagcgcgcgcgatgcagaccctgaaatggcagatggctaacggcatccagtacgttcgtactcacgttgacgtttcagatcctacgctcaccgcgctgaaagccatgctggaagtgaagcaagaggttgcgccgtgggtagacctacaaatcgtcgcctttccgcaagaaggtgttctgtcttatcccaacggtgaagcgctgttagaggaagccgtgcgtttgggcgctgacgttattggcgccattccgcactttgagttcacgcgggaatatggcgttgaatcgctgcacaaaatctttgcactggcgcagaaatacgatcgcttgatcgatgtgcactgcgacgaaattgatgacgagcagtctcgctttgtcgaaacggtcgcggcgctggcgcatcgtgatagcatgggggcgcgcgtgaccgccagccacaccacggctatgcactcgtacaacggcgcgtatgcgtcacgcctgttccgcctgttgaaaatgtcggggattaacttcgtcgccaacccgctggtgaatattcatctgcaagggcggtttgacacttacccgaaacgtcgtggcgtcacgcgggtgaaagagatgctggaagcggggatcaatgtctgctttggccatgatgacgtcttcgacccgtggtatccattaggcaccgccaatatgctgcaggtgctgcatatggggttacacgtttgccagttgatggggtatgggcaaatcaacgacgggttaaatctgatcactatccacagcgcaaaaactttgcacctgcaggactacggtctgagcgtcggcaatgccgcgaatctggttatcttacccgctgagaatggattcgacgcggtacgtcgccagacgcctgcccgttactcgattcgccacgggcgggtaattgccgagacggtgccgagccagacgacgctgcacctgacccagccggaagccgtgacgtttaagcgttaacccgtcatacccgcgctctccggcacattcaccacgcagccccgtaaggggctgcgttcggaagactgctccggcaagagattcaggccgccagcagactggcgcgtactttcactaccactttcttgatgtcatccggctcacccactgcacatcccggtttatgcggttctcccggcataaacacagcaaacatccccgcttgcagcgtaatagtctgctcgtcgacaatttgactacaaagctggtaatcctcttcaacgtgcatctcctcgcactggcgagcggcaccggacatcccaaacgcaatacgctcgacgccggttagtagtagctgaatatcaatgtattgttcatgcaattccgctttcttctcggccggcatttgcgtcgttaactgcattacattcataaagacattgtcgccctgcaattcatagcgccccggcgctttctcctgcggccttgccgccagcgcgagagtcaaggcatccaacaatcgcggatgcaacccgcaagaaggcaacgactgtacttcccccatcatcataatgtgtctccttgagctaacaacgcagcgcctaataatcctgcgtcatgccgatagcgagcggcgctcagcgccacgtgataaggcgcaggctcttgcatcaaaaacgcgcgaacctgctccaggtatccctcagctaaccctacgctgccgccaatgaccacacactggcagtcggtagtcgctttcacatcggcgatcattcgcgctattacctgcgcggattggcttaccagatgtcgcgcctgctgatgaccttcgccagcgcgaataaatagggttttggcgtcgcatcccgccagatcgtcccgcgccgccgcggccatccctcgtccggaggcgatggcctctacacaaccaacgcgtccacagccgcatacgggcccgtgtgggtccgccagggtgtgtcccaggtgcccggccagaccgccttttccggtaaggagcttgccgtcgcagacaacgccgccgccaacgccggttgaaacggtgataaataccatatcgcggatatcatcagggagcgcgtgatactccgcccaggccgccgcctgcgcgtcgttcaccgccagcgtcggcaggccagcgatcgcttccagtgtttgtactaacggaaagtgtagcaagccgcccagattatgggggtttagcgccagcagcatcccttcctgaatgatcccggtagaagctatcgctacctgacgcgcctctgctcgtagtggttcaaccagcgcctttaatgcttcacgtaacgcatccggcgttttgctcgcgggggtcggtagctcgcgacgctggctaatgcgcaagttgttgtcgatgagcgcggcggcaagtttagtaccgccaatatcgattgctaacgtagtcatgacgccgccttttttaatgcgtcgttataccatccacagatatgttccagacgggtaatggcggaccccaccgtcaccgcccatgcgccatagcggatcgcctccgccgccagtgctggcgagttatagcgcccttcggctattacccggcatccggcgtcatgcaacgctttgactaagggcagatcgggttcctccggcgtatcgggggtggtgtagccggacattgtcgtgccgataatgtccgcgcccaaccgttggcaggcgagaccatcgtccacggatgagcagtcggccatcgccagtagatggtggtgatgaatgcgcgccaacaacgcctcaacggctaccggccgttgccgagcggttccatcaacggcgataatagctgcgccggcctgcgccagcgcatctacatcgtcgagaaaaggggtaatgcgcactggagactcatccagatcgcgtttgataatgccgataatgggtaccgaaacgagcgagcgggtcatacgcaggttgtctatgccttcaatacgcaccgcaaccgcgcccgcctgttccgctgccaacgccattgccgctacaatctccggcttatccagcgggctgcccggaacgggctggcaggagacaatcaggccgccagaagcggcaatatttttatccagttgttcaagtaacgacatactactcccttacaaatattgcccggttgaaaaccgggcaagcggattaacttttcgtttttacaaaggcacctttaccactgccaagcggtacggctccgctgaacggtttgtcgtcgatagcatcatgggtgcgtaacgcttccggacgtagccaacgctgtacgcgagacggcatatcaagcccaataagcaggatcacgacaaacgtcaggctgaaagagagcgatgccagcgcagtgcccagatccagacgttgagcgatcagcgctcccaggatcggcgccagcgcgccgccgagcgcgccgacgttataagtaaagcccagccccgccgcgcgctgatcggtatcgaagtaaccgccgatcagtttcggcagaatcccggcaatcccctgccccaacatctgttggaaaaacagtagcagacccagaacccagacgtttgtgccgccaatcgcaaagaccggaataatgaggatttgcgaggccagcaggctacagacatatgctttacgcgttcccagccagtcgccaagaaaaccgcctacgcagcaaccaaccgccgcgccaaatccgctaaagaacaggacattcgccaccgtatgcggatcgtaggccagctcggttttcagataagtgggtaatagcgcctgaatcggccaggaatagaggaaagcaaacagtaccaccagcatcagcatgacgccagtgggccagcgtttaccgctgctctgcaccataaagctgataaagataaccgcgcacagtagtcccagccccgccacaatcgcagcattttgtaggttaccggcaaaacagaaccacagcgcagcggcggcggcgaaagtcattaaaatgttgatgatgcgatgttcgccccgataaagaatgtcgaccatcgtacgtaccggcgctttacccgcgtgtttctctttccagtcttccgcttccggaatgtttttccgcagccagagagcgaagataattggcaaaatgccaatgaaaaacagcgcgcgccagccccagacaggcaccaccaggctgtacacctgcgcggcaacgaccgcgccgacggagaagccggaaatcagaaaaccgctggctttattgcgtaaatgttttggccagctttcaatcacataggtcgcgctggaaccatattcgcccgccatgcccataccaatcaccagtcgggcgatgaacatggtggtgtaaccgggcgcaaacccgcatgccagggttcccaccgaaaacagaatgatgctgctgaccatcgccagacgacgcccatagcgatcgcccatcgcgcccagtaataacccgccgaaccagcgagagataaaagccgcagaaatcaggcttgccgcctgtaccgtcgtcagcccaaattcgctttgtacctcagtcagtacaagagcaatcaacacaaaatcaaaaccatcaagcagatatcccagccaggcagcggaaaatgcccgccactgcgcccggttgagatggcgataccacgggatgttctgggtagaagtactcattttactctcccgacgatttttgttgtcgttatgccgaatggcggctccgccttatccggcctaccgctcacactgttgtaggccgggcaagcgtagcgcccccggcattatgctgttacgccttttcttccatcagttgttgagccagcgccttgagcgccggcaggtatttttcatcaacaggcgcgaacggtttacgacacagcggcaccgataccacgtccatataatgcaggaccgttttcaggccgcggaatacgccggttttaatcagtaaatcaataaccttattgcactcggtttgcagacgctgcgctttcgccacatcgccctcacgtaatgcctgcacaatcccctggtaacgccagcccataatgttgtatgtgctgccgataccgccgtccgcgcccgccagcaggccggaagcgaagatttcgtcataaccgttgtacagcaccagatccggatgcgcgcggcggatctgctccatctggaagagatcgccggaggtttgcttcagcgcgctcacgcccggtaatgtcaccagcgtattgatctgatcgagggtaagttttacaccgcttaacgccggaatgttgtataccaccatcggcaatccatctgcggaatcaatgattgcccgataatggtcacagtgctcttcaaaactgaaagggtaataaaaaggcgtcaccgcagagaccgcatcaaaaccgtaacgctttgcggcgctggcaagctgctggctttctgcggtgcttactgtcccgacatgggcgatcaacgtgatttttcccttcgcctcttcggcgacaatctccagtacctgctctctttcagcaaggctctgtacgaatgcttccccggtggaaccgccaacgtacagcccgtcgataccctgcccgatgttaaaacgcaccagacggcgcaggctttcgctatccagttgctgctgatgatcaaatggggtcaacaacgccgccattacgccttgcaatgcttttgccatacctacctctacggatgatgaatatattaactacctacctttatacctgttataccagatcaaataagcagcaaataatacagaacgcttatagtgcgatctgcttcactaaaccgggatcggaggtgcgatcgctaccgcattttttgactttttttaccgagcgcgtgccaggtagcggaaacgctattgaggtgggtttgcagagcgcgatccgctttatcgggatctcgctggcgaatggcatcaacaatcacaatatgttgttgataactcacgttattatgttcatgcagctcacgatcgggaacgcttgggcgagcggcgattagccagtccagcagagcaacatgaatagccataaagatcggattgccgggaatttcagccagcacccggtgaaactcgacatctgaacgaataaacagcgcgttgtcatccagcgactggctattaatttccagcgctttcgttaacaacgcgatctgctcgtcggtagcatgttccgccgcatagcgtaccaggctggattcaaagaaaagccgtagctgttcaaagtgagcgatgccgccaggatgagtaagaaaatctttcgccatacccgacagttcactgatgatggtatcagcggaggggcgcgagacgcgggcgcgttcgccgttattgatttgcaccagacctttacgcttcagcgcagctaacgcttcacgcacggagggacgtcccacattgaagaaggccattaattcacgttcagacggtagctgttctccctcgccaaactcatgacggcggatcatctgctccagctcttcctcaaccatttcagacagttttttacgcgccagcgggcggcggcgcaaactacgcccgagggatgtcggagaatcttctgcttgcgaatcaaatgcgttcataacgtccattcatgagtggtcggtggcaaataatagcaagcttatcgtaacacagctttaaaagcagggtgaacccgagaggagaccaaacaaaacaggcccttcagggcctgttgattattttactacacgcagcgccggacgtccgccacgcggcggaggcggctcgtcatcaggactactgtcgtcatcgtggtcgggcttatcaccatcaatgacggacatcacggtctcgctttccgcgcctgcggtattgtcatcatcatttaagctgacaacgtcttcatcataggcggcttcaggctcaaacatggtgcctgcgccattttcacgggcgtaaatcgccagcaccgcagccaaaggcacagaaacctgacggggaacgccgccgaagcgcgcattaaaacgcacttcatcattagacagctccagattacctaccgctcgcggcgcaatattgaggacgatttgcccatcgcgcgcatattccatagggacatgcacgccaggcagcatcacatccaccaccagatgcggggtcaactggttatccagcaaccactcgtagaaagcacgcaacagataaggacgacgcggcgtcaactgtgacaaatccatacaggttaaccccgaccgaggcgcatttcacgttcagcttcggttaaagaagccaggaaagaatcacgttcaaagacgcgggtcatatagcctttcagctctttcgcccctgcgccgctgaattcaatacccaactgcggtaaacgccacaggagaggcgccaggtagcaatcaaccaggctgaattcgtcgctcaggaaatacggtttctgaccaaatactggcgcaatcgccagcagctcttcacgcagttgtttacgtgcagagtcggcctcggaagcagacccgtttacgatgacgttcatcagcgtataccagtctttttcaatacggtgcatgtacagacggctttcaccgcgcgcgaccggataaaccggcatcagcggcggatgagggaaacgctcatccagatattccataatgatgcgagattcccacagggtcagctcacgatccaccagtgtcggaacgctttgattcgggttgaggtcaatcagatcctgaggtggattgtccttttccacatgttcgatctcaaaactaacacccttttcagccaacacaatgcggacctgatggctatagatgtcagtaggaccagaaaacagcgtcattaccgaacgtttgttggcagcgacagccatgaaaacctccaggtatattcagaatttttactgctaccagccacaatgtgaccagccagatgttatgtcacccagggcgaaaaaagccatcattgctcagaaacgagacaaaaaatgaacattccccgctatttgggcagaaaattggatgatagtttaccagattttgtgacctttgtggtgagtcgattctggaaatgaggaaaaagagatattcctggtctgaaatgctcgccccacctgagatattgtctttcgcctgttatgcctgtactaccggtgcgccccagccatcaaaactgccgccatgtttttcagccagatcggtaagctggcaagtgatttctgtcatatgccattgttgcggagcatcggtgctgataaaagacgccataaacccctgttgcgggtcattcattcgaatactgaccagcgttatgccatacggtaatgcagcaatatcttgcgccaggtcgcgcgctgcgacctctgtaggcaatgtcgcataataatcaatagcgcgcggaagcgtcagatcatcaccttgttcctgtaatccccggcacacacgggaatcgtgtatccagttccagtcgtatcgggttggatacaagaactggcggtaaaagtttcctttatcattgtgactctctctataactaaaagagatttccgggccaccagcgagcaatttatccagcgtcttttcccagttaagatcctcttccgacatgaacacaaaatcgcgccagccttgttgggtaaccacacccaccagccagatcggaaacgtcttccccttttcatcaagccagtcctctatacgatttaaactctgtgtttcatcgggctgcggtaaaccattttcataacagttggtgtaatgaacacgtaagaacccggtatggataaggcgatcaaatttttcatcctgaatggcgccgatatccacacgtatacccgtaacatggtcatccaccgttgttataaagaattcccatttattcgacagcattaacgactctttcttagtaaacaatgagttaaaaaatcccactgtgacttccttttctctgagcgtgcatgaaaaatgaataagatgagaataatgctaaagatagggaggaaaagagactggattcggactttagccataaaaaaacccgccgaagcgggttttttcgctaacagttgtctgccgaagcagaaccccattaacgtttggagaactgcggacgacgacgtgctttacgcaggccgactttcttacgttcaacctgacgagcgtcacgagtaacgaagccagctttacgcagttcgccacgcagggactcgtcgtactccatcagagcgcgggtgataccgtgacggatcgcaccagcctgaccagagataccaccacctttaacagtgatgtacagatccagtttctcaaccatgtcgaccagttccagcggctgacgaactaccatgcgggcagtttcacgaccgaagtactgttccagagaacgttggttgataacgattttaccgttgcccggtttgatgaacacgcgagctgcggaacttttgcggcgaccagtgccgtagtattgattttcagccattgcctataatcccgattagatgtcaagaacttgcggttgctgtgccgcgtggttgtgctcgttgcccgcgtaaactttcagtttacggaacatagcacgacccagcgggccttttggcagcatgcctttaaccgcgatttcaatcacacgctcaggacggcgggcaatcatctcttcaaaggtcgcttgtttgataccaccgatgtggccggtgtggtgatagtacactttgtcagtacgcttgttgccggttacagcaactttgtcagcgttcagaacgatgatgtaatcaccggtatctacgtgcggagtgtattccgctttgtgcttaccgcgcaggcgacgagccagttcagtagccagacggcccagagttttaccggtcgcgtcaacaacataccagtcgcgttttacggtttctggtttagctgtaaaagttttcattaaaagcttacccaaataaataagttacacgttggtgaacacccaaacgttttaaatagttgaggttcacacgacaaagtccggtaaacctaccccctcggatatgtttggccggcacagagaaagtttgggaaaaaactctcttgtaacgtggggtcgcaggattatagagaagtccaggtcaaagatcgacccctttttgcgatttgccgcgggttttgttcaggcctggttcaccctccggtcggggaggttgcacagatataataccgcataatgccggagcgctgcgcttgtccggcttacggcatatgctcccgcttgagatactccgcactctgcatctcttgcaggcgcgacagacagcgctgaaattcaaacttgagccgctccccctgataaatttcatataacggcgcggcagcgctgaccaccagcttaacgtggcgctcgtaaaactcatccaccagcgcaataaagcggcgcgcttcgttctccatcagcggcgtcatgaccggcacgtcaaacagcagaaccgtgtgaaataaccttgagagcgcaatgtaatcatgctggctgcgggcctcgacgcacagcgtagcgaaagagaccgctagcgtttggttttcaacgcccagggtggataaagagcgatgattgatttccagcgtcggagcgtgctcgcgcgcggcccccgctaacgccagccacagtttatccatttgccgccgggtttcatcattaagcggcgttagccataaatgggcctgcgtcagcgtccgcagccggtaatcgacgccggcgtccacattcataatgtcgcagtgctgtttaatggcatcgatagccggcaggaagcgggcgcgttgcaaaccgttgcggtagagttcatccggcggaatattggaggtcgcgaccagcgtaatgccgcgtgcaaacagcgctttcattaaaccgcccagcagcatggcgtcggtaatatcggtgacgaaaaactcatcgaaacacagtacgtccgtctcggttttaaaccgatcggcaataatgtctaacggatcgatctgtccctgtaacgcggtaagctcttcatgcacgcgcagcataaaccgatgaaaatgcaggcgtagttttcgctcgcccggcaggctgtggtagaagagatccatgagccaggttttgccgcgacccacgcccccccacatatacagcccgcgaaccggtatttgcgcgtccggttcgtttttgcctaataatttccccagtcgcgctatcagaccgccgggtggcgtagccgacgattttttcgcggtgagcgcctgataaagggtttccagacggtcgaccgcctctttctgtacgtcgtcaggctgatgggtgccttcgttgagtgcctggagataacgcgatgtaggggaaaggctttgcataatgttattgttattccttgaaaatcgatgtgccgtcgttcacggctgacgaaaaaaaggccgttctacactacgcgatatgctgtcgggattccacttctacggaattagcggttatagtggcataatcaggcgcgggcatggagcctggagccaacaccctacggaaacataagacaacgggagatgttcatgacctgggaatatgcgctaattggattagtcgtcggtatcatcattggtgccgtggccatgcgttttggtaatcgtaagttacgtcaacagcaggcattgcagtacgaactggaaaaaaacaaagctgagctggaagagtaccgtgaagagctggttagccactttgcccgcagcgcggaactgctggataccatggcgcatgattaccgccagctgtatcagcatatggcgaaaagctccagcagcctgctgccggaaatgtctgcggagtcgaatccgttccgtaaccgtctggcggagtctgaggcgagcaacgatcaggcgccagtacaaatgccacgtgattattctgaaggcgcgtctggcctgttacgtagcggcgcaaagcgcgattaatcgcacgccgttaagaaatttatcgggcgcatcgcttgcgccctctctctatctttcctgtcccagctattatcattgttaccaggctgaaaattcaataacatcaatctgttttgaattgtctatccgttcattcaaggtacgagagcagcatccatgaaaaaacacacccagctgttaagtgcattagcgttaagtgtcgggttaactctttcggcgccgtttccagcccttgcatcgataccaggccaggtgccaggccaggcgacgctgccaagccttgcccctatgctggagaaagtgctgcctgctgtcgtcagcgtaaaagtcgagggaaccgccgcccagagccaaaaagtgccggaggagtttaaaaaattctttggcgaggatctgccagaccagccgtcccagccgtttgaaggactcggttcgggggtgattatcgatgccgcgaaaggctatgtattaaccaataatcatgtgattaatcaggcacagaagatcagcattcaactgaatgacggacgcgaattcgacgcgaagcagatcggcggcgacgaccagagcgatatcgctctgttacaaattcagaatcccagcaagttaacgcaaattgccatcgccgattccgacaaactccgcgtcggcgatttcgccgtggcggtcggtaatccgtttggtcttggacaaaccgccacctccgggattatttcagcgctgggacgcagcgggcttaatctggaagggcttgagaactttattcaaaccgatgcctctattaaccgcggcaactccggcggcgcgctgcttaacctgaacggcgagctgatcgggattaataccgcgatcctcgcgccagggggcgggagcatcggcattggctttgctattccttccaatatggcgcagacgctggcgcagcagttgattcagttcggcgaaatcaaacgcggattgctgggaattaaaggcactgaaatgaccgctgatatcgccaaggcattcaaactgaacgttcagcgtggcgcttttgtcagcgaggttttacccaattcaggttcggcgaaggccggggtgaaatccggagacgtgattatcagtcttaacggtaagcagctgaatagctttgccgaactgcgttcacgtatcgccaccaccgaaccgggcacgaaagtgaagctgggcctgctgcgcgatggtaagccgctggaggtggaagtcacgctggattccaatacctcttcttccgccagcgccgaaatgatcgccccggcgttgcaaggcgcaacgttgagcgacggccaactgaaagacgggacgaaaggcgttaaggttgatagcgtcgaaaaaagcagtcctgccgcgcaggccggtttgcaaaaagatgatgttatcatcggcgttaatcgcgatcgcatcagttctatcgccgaaatgcgcaaagtgatggcggcaaaaccgtccatcattgctcttcaggtagtacgcggcaacgagaacatttatctattgctgcgctaatcctgtcttaaaccgggcatcagcctgcgatgtgatgtccggttaactcatggtatgctgctgccgttcccttttttaacgacgcctccatcatgtttgtgaagctcttacgttcggtcgcaataggtttaattgtcggcgctattctgttggccgtgatgccttctttgcgcaaaattaatcctatcgccgtcccgcaattcgacagtaccgatgagacgccagccagttataattttgcggttcgccgcgccgcgcctgccgtcgtcaatgtctataaccgcagtatgaacagtaccgcgcataatcaactggagatccgcacgctgggttccggcgtgatcatggatcaacgcggttatattattaccaacaaacacgtgattaacgatgccgatcagattatcgtcgcgctacaggatggccgcgtctttgaagcgctactggttggctccgattcgcttaccgatctggcggtgctgaagatcaacgccactggcgggctgcctaccatcccgattaatacaaagcgtacaccgcatattggcgacgtcgtactggctatcggcaacccatataatctgggacagaccatcacccaggggatcatcagcgcaacgggtcgtatcggcctgaacccgacggggcgacagaattttctccagaccgacgcctcgattaaccacggtaattccggcggcgcgctggtcaactcgttaggcgaactgatggggatcaacaccctctcttttgataagagtaacgatggcgaaacgccggaaggccttggttttgcgattcccttccagctagccacgaaaattatggataagcttatccgcgacggtcgcgtgattcgcggctatatcggtattggcggacgagaaatcgcgccgctgcacgcgcagcagggtagcggcatggacccgattcagggcattgtcgttaatgaagtgacgccaaacggccccgccgcgcttgccggtattcaggttaatgatttgattatttcggtcaataataaacccgccgtgtccgcgctggagacgatggatcaggtggcggaaatccgcccgggctccgtcattccggtcgtggtaatgcgggatgataagcagctcacgttccaggtgacggtgcaggaatacccggcgtcgaactaaaacgacgcggcttttgcccgcgtcgttcgacgactagtcaataaagactggccctgccggaaaatgcgccaggaaactcgtgaagatcagcagagcggggagacttttctccccgacggcttcttcacgcagcgccttatccagtacaagcaggctatgctcccccccttcccccaaaatgccgcccatccagagcagtcgttgcgcctgttgacgcgcatactgcgatgcgcttttccaggcgaccagatgcagcaacgtttgtaacagcaggacccgagacgcgtgaccatcgcgttgcaatcgcctgaatacgggtaatgcaatactacgtaccgtcgagaaaccgctcgccgcctccccctcaatcggcgataaaccaacagccgcctgtttgacgaaatcgcataactgattgtgtgttaatggccgctcgcctgcgctcatataccctgcggcaaaacagagtaacccgataccctgagcccaatcggttgatggcagaatcccctgcggaacattcggtgccgacgtctgtgcggcacaaagcccctcgtcgtaacactgtgcaaaacgttgctcatatattgctgagttgacgccagaccacggcagtaaatgcagcgctggctcaagctcagttatctgattcaccgtctcaacaacataatgcaagatggtttctctggatggcatggatgtaccttgccgaaacgcaaccatttcactcattactgtgtcctcattttgcgggaacagaatcactgctcccgattagattggattacatcgccagcacgtacttgagcatcacgcccgccgcaatggccgagccaatcaccccggccacgttcggccccatcgcgtgcatcagcaggaagttctgcgcgtctgattccaggcccactttgttcgatacgcgtgccgccatcggcaccgccgacacccccgccgaaccgataagcgggttgattttgttcttactgcacaggttcagcagcttcgccatcagcaccccggccgccgtcccaatcccgaacgcaatcacacccagcagcagaatgcccagcgtctgcggctgcaggaacttgtccgcgaccagcttcgcgcccaccgacagcccgaggaagatggtgacgatattaatcagcccgttctgtaccgtgtcgctcagacgctccaccacgccgctttcacgcatcagattgccaaagcagaacatccccagcagcggcgcggcgtccggcagcagcagcgccaccagtagtaacagcaccaccgggaagaggattttttcccgcttactcaccgtgcgcagctgcaccatgcggattttgcgctctttctcgctggtcagcgcgcgcataatcggcggctggattaacggcaccagcgccatatacgagtacgccgccaccgcgatggcccccagcagctccggcgccagcttgcccgacagataaatcgccgtcgggccgtccgcgccgccgataatgccgatggccgccgcctgcggcagggtgaagctgataaggccgaagtagttcagcgtcaacgcccccagcacggtggcgaagatgccgaactgcgccgccgcccccaacagcagggtgcgcggattggccagcagcgggccgaagtcggtcatcgcgccgacgcccataaagatgaccagcggcgcgacgccggagccaatcgccactttatagaacagcgccagcacccccggcgtgtagcccatgtccaccgccaggttctccatctggctctgcaccgacggcagcgccagcgctaatgcttccttaatggcatgcacgtccggcgcgcagtggagcttcgcggcaatcaccgccagctgtccggcgtcgtggtgcgccagcaggctttccagcgcggtcagcgccagcccggcctccggaatgttcgacagcagcccgccgaagcctatcggcagcagcagtaacggctcgaacttcttcgcaatcgccagccacagcagcagcaggctgaccagcagcatgatggcctggcctgcgccaaggtgcatcagccccatgccctgaagcagggcgttcagactttccatttccgctcctcgtccttacgccagcgtcatcagggtgtcgccgacggagaccgcatcgccggacttcaccgcgataccgcgtaccgtcccggcctgcgcggcgcgaatttcggtttccatcttcatggcttccagaatcagcagcacatcgccttcggccaccgtctggccctcggtggcaatcaccttccagatgttgcccgccagcggcgcggtgaccggggtgccggcgcctgcgggagcggcagcctgaaccggtgcggaagaggctgccggaacagccgcagtaagctggctgatatcgccgccgtcgctgaccttcaccacaaaggctttgccttccacttccacggtgtagataccggaagctgcaggcttctctgcttttgccaccggctgcgcggcttccgcctgcggcagtggctcaaacgccgccgggttgtggcggttctcaaggaatttgaggccaatctgcgggaacagcgccacggtgagcacgtcgtcaatggcgtttcccgccagagtaatgcccttctcctgcgcctgacgcctgacgtccgcttccagttcagccagctccggtttgagtaaatccgccgggcggcaggtcaccggagcgcccccttccagcacgcgggcctgtaacgcggcgttcaccggcaccggcgtgtggccgtattcgcctttcagaatgccggccgtttctttggcaatggtcttgtagcgttcgcccgtcagcacgttgagcaccgcctgggtgccgacaatctgcgaggtgggggtcaccagcgggataaagccgaggtcctcgcgcacgcgggggatttccgccagcacctggtccagtttgtccgccgcgttctgctgcttcagctggccttccaggttagtgagcattccgcccggcacctgggccaccagaatgcggctgtcgtagcccttcagctggccttcaaaggcgtgatactttttgcgcacctcgcggaagtacgcggcgatattttccagcttcaggatatccagcccggtgtcgtgttccgtgccggcaagcgttgccaccagcgcttcggtggccgggtggccgtaggtggcgctcatggacgaaatcgccgtgtccacgccgtcgacgcccgcctcgatagccttcagcagggccatctccgccatcccggtggtggcgtgacagtgcaggtgcaggcgcacctcaaaacgttttttgatttcgctgaccagctcatacgccgccatcggtgtaagaatgccggacatatccttgatggcaatcgagtcaacgccggtctctaacaactgttcggttaaatccagccaggtctgcagggtgtgcgccgggctggtggtgtaggagagtgtgccctgggcgtgcgcgccgtggctgcgtactgcctgcagggcggctttcatattgcgcgggtcgttcatggcatcgaagacgcggaacacgtccatgccgtttttcactgcccgctcaacgaagcgttccaccacgtcatcggcgtagtggcggtagccgagcaggttctggccgcgcagcagcatctgcagcggggttttgggcatggcttttttgagctcgcgcaggcgcagccacgggtcttcgccgagaaaacgaatacaggcgtcaaaggtggcgccgccccagcactccagcgacccgtagcccacgtcatcgagcgcggcggcaatcggcagcatatcgtcaaggcgcaggcgggtggcgaacagagactggtgagcgtcacgcaggacgacatcggtaatggcaatggtcatggatccctccgggaattaagcattaaggcggtgatggtggtggatagcggcggcaatgaccggctttaagcgggtgaagtcgtccacgacgggcgcggcggcggcaggtgccgccttcggcgccggagccggttcagggaagaagcggttgacggcggcggacatgccgcggatggcgaaaatcagcaggaacagaaacgccagcacgaaccccatgccgaggaacatcagggtgaagccttcacctaatagcagagctgcattagtcataaaatagccttcaggcaggaggcacgataatggggctatttatgacgatgaaataataagggtggatttccctgagccgccccggccagagcccttggttattattatcgtcataacgtattaccaccattatcgtgcaatttacgtaatcaggtttatttgatgaaacttacgttctggcatatttcatcagcgacgatctctttacgctgattaaaaataattttgttctgttcaaacagattattcccatgggtatcaatagaaacaatcagcgggccaaactctttaacccgacagacccacagcgtttccggcatccccagatcgcgccattgggcatcttcaatttcttccacgcacacggcggctacaaccgcacaaccggcagggaatacgcagtgcagcgctttgtgttcagcacagccctcttcggtacctttacccataccgcctttacccacaattaatttcacgccagtctgcgcaataaactctttttcgaatttctccatacgcatgctggtggttgggccaacggagaccatttcaaacttatcgtcttcgcctttaattgggcggacaatggggccagcgtgtaaaatagcgccgccgcgaacatctaccggaagttcgcgaccaccttcaattaaacggcgatgggctacgtcacggcaggtaacaatatgaccgttgagataaataatatcgccagccttaatatccgctaaatcttcatctttaattggcgtagtcaggatttttttagtcatcagaaattcactccgctgtgagacgtaatggtgtaattcaaatctttatcgaaaacgatatgccctttacggtgcgaccagcagccgacgtttaccgccacgccgatggtagaaggatgacgcgcggtgttttcaatgttcacgcccataacggaggtattaccggacatcccctgcggccccaggccaattttgttaatgccgtcttccagcattttttccagcgaggctgcacgctcattctcgttatgcgaaccgatcggacgcatcagcgcttttttcgatagcagtgccgccgtttcaacagaggtcgctacgcccacgccaaccagcagcggcggacaagcgttgaggccgtagctggtcatcacatccagtacaaagcgggtcacaccttcatagcctgcacccggcatcagcaccatcgctttccccggcagagaacaaccaccgcccgccatataggtataaatgctgcactgatcggaattgggaacgatttcccagaagaccgtcggcgtacctttacccacgtttttaccggtgttgtattcatcaaaagtttctacgctgttgtggcgcagcggagaatctacagttgctttgatcaccgcctcacgcaacaacgcttccagctcgccaatcagcggaaagttcgtcccgcactccaccagaaactgaatgacaccggtgtcctggcaggaaggtcgatccagctctttcgccagacgctggttctcaatcatggtagtaaagatgacgtcggccagtttactggtctctttcttatgcaaatcttccagttttgcagtgacatcatcaggcaaaactttgccggtatatcccacaaacttggccataacgtcggtcatatgggatatctgttcacttttgctcataaatgctccttagtcagaacagcttccgttaattacggatgaaaagggaaaaggattggcagcaggatcaagctgacaatggttgaaacgataatcagggggataccggccttagcgtagtcgacaaatttatagccacccgcggagagcaccatcatgttggcaggcataccgataggggttgcgtaggcgcaggaaccgccaatgaccgtcgccatcagaaccgcacgcgggtcggcccccatgcctgcggcaatggacaaactcaccggcaccaatagcgctgtcgttgcggtattggacataaagttggtcatcacaacggataaggcgaaaacggcgatcagcaacatgaacggtgaggagttttgccccagcatgccgattacatagtccgcaaccagcttgcctgccccggtcatttccagcgcttttgccagcgccagggtgccgccaaagataaaaatagtctgtgaatcaatagctttataggcctgtttttccgtgagtacgccgcttactaccagcacaagagcgccaatacaaccggtcacggccaggctgacaccgatcttcttctcaaagatcatgccgaggatcgttgcgatcaacaccacgagtgagagccgttgtttccactgtggaacatggctgtagtcacgttgcaccccgacgctccccacctcaccgccggtcgcattattcggcagaaagcgatagccaatagtcaggaagtagagaatgccgcagatgagcatcgggagaccgatttttgcgtattcaaaaaagccaaagccgccgccaatattctgtagcgcagactgcgcgataagatttcccggcgcgccaattaacgacaggttaccgcccaacgcagcggcaaaaaccagcggcatcagtagacgagaacgcgagaagcccgattttgccgccacgccgatcaccaccggaatcaaaaccgcagcggtaccggtgttagagaggacgccagacatcaaacccaccaccaccataatggtgaagatcagctgtttttctgttttcgcgaagcgcgtgatgacgccgcccactttgtttgccataccggtctcgaacaacgcaccgcccacgataaacatcgcgacaaagaggatgacgttagtgtcgataaagccagcaaaggcctgtttgatattcagaacgccggtgataactaaggccacgcagacaatcatggaagtgacggccagtggcactttttcccatacaaacatgacgatagcgaacaccaataaacataaggtaagggtaatgggttccatatttataattatccaatcaatgatatatgatattgtatccaatgttgacagggagaaattattcccatacaaaaactaagtcaaatcgtttctcaggaaagatgcaggagtgggatctacatcaagatcgtggttagatcgttactggacgtgattaatagaattgaagaattggttgaagcgcctgcgatgctcacgcaggcgaaaagatcaggcagaagggtcaccaacatagcgggtcagcatattctccattgagcgaataatgtgttcgcgcatgcgctggcgtgccaatgtttcatcatgaagttcaagagcttgcagaatacttttatgttcctgaatggaaatcacggcatactcttcttcggtgaccttatggcccatcgacaggccgttccacatattacagagcaacattttcattttttcgttgccagcaacattccatatttccatatgaaatgcctgattcaggtcggagtattccgccgagttattttccgcgagagccttttcagcggcataatgcacctgggctatccgcgagatatcggagccaggacgagaagctttagccaccgcctcactttctaacagcgcgcgaatttcatagtgttcacggatcgtttgttcattgatgcccaacaccaccgcccctttattagggcgcacttttatcagcccatccgccgccagaatctgaaacgcctcgcgcactggcatactggacacgccgaccattccggcaatgccttctaacgtaatctcctgcccttccactaactccctcgaaagaatcgctttacgcagcactgccgcgacctgttctttcgctgaaagaagcttaatcttccctaacttaggcttctgcactttcccaatccttcatatgttgacgcattatttctgctaaagagaggaaataacgctgcataacttgcccaatctcatcacgccgcccctggcgtatgacgtcagccagttcagcgaaaagctgcgccgactcctgattatcttttttcagatgcaaaataacataagagacataaccgtccaggaactgctgatacaccttttccagatagcggttattcacataagaaatcagcatcgcatgacactccagttcgcaggatttgtcttctgcgacagccagcgcttgcgcacgtatcaggagggcatcgcctacttcgctgggtatcagcgaaaacatttcggcggccatcgcggcaatcacgcgaaaaatatgactcacgcgatcggcctcaagatgcgcgacctgcatgtgcctgttgggcagtcggattaaaaaaccttcctgttcgagtgactgtagcgcttctcgaaccggcattcgtgaaagaccgagctgctccgcaatactttcctgcgcgagttcttctcccgcttttatattgccggaaagaatttcatagcgaagcatttgcgtaatgtgatcgcgggtttgcgttctttggatctttttcacgacgttctcgttaataaccgataagacgtgaggagtttagcagatttagtgcttgatttcgtggcttgtttacagtcaaagaagccggagcaaaagccccggcatcgggcaggaacagcttatttattaataaaatcttcacccaactgaatatcttttttcagcgtatccagcatagcgtccagcgaatgttgctcgaaagcgctcagtgtgccgatggatttacgctcttctacgccgtttttacccagcagcagcggctgagagaagaaacgggcatactgaccgtcgccttccacataggcgcattccaccacgcccttctcgccctgcagagcgcgaaccagagaaagaccgaaacgcgcggcagcctggcccatagagagggttgccgatccgccgccggctttcgcctcgacgacttcagtaccggcgttctgaatacgtttagtcagctcggccgcttcttgttcggtaaaacttacgcctggaatctgcgacagcagcggcagaatcgtcacgccggagtgcccgccaatcaccggcacttcaacttccgttggcagcttacctttcagctctgcaacaaaggtattagagcggatgatatccagcgtggtaacgccaaacagtttgtttttgtcgtatacgcctgcttttttcagcacttccgccgcaatcgcaacggtggtgttcaccgggttggtgataatgcccacgcacgctttcgggcaggttttagcgatctgctgcaccaggtttttcacgatgccggcgttaacgttaaacaggtcggaacggtccatacccggcttacgcgccacacccgcagaaatcagtactacgtcagcgccttcaagcgccggggttgcgtcttcaccggagaaacctttgatttttacagcggtggggatgtggctcaaatcaacggccacaccgggagtcactggagcgatgtcgtacagggagagttctgaacctgaaggcagttggttttttaaaagtaatgccagcgcctgaccgataccaccagcagcgccgaggactgcgactttcatcctaaactccttattatatgattagctaagtgtctattgctccgcggcggcgaccttaattcacaaattcaatgattacaatcctcactcatcaagaatgcggagtcgcgcaattttggcttttatgcatttaatttgcgtaatccggatcggctgcaaccagagagcaacgttctacaggtggtgacaatataccctactaccctctcaaaacaacatcattttgataacaattaatttacttttaatcttatttgcgaggcgtgacacaggcatgtttcttgataacgaaatttgataaaattccgctctttcataacattatttcagccttaaacaaggcagactgtttgcataaaaattcatctgtatgcacaataatgttgtttctaccgccatattacgggtgacttatgcgaagctcggctaaacaagaagaactagtaagagcgtttaaagcgctcctcaaagaagaaaaattcagctcacagggcgaaatcgtcctcgcgttgcaggatcagggctttgaaaatatcaatcagtccaaggtctcgcgcatgttgactaaattcggcgcagtgcgtacacgtaacgcaaaaatggaaatggtgtactgtcttccggctgaactgggcgtcccaacaacatccagtccgttgaaaaatctggtgctggatatcgactataacgacgctgtcgtggtgattcataccagccccggcgcggcacaactcattgcacgcctgctggattcactggggaaagcagaaggtattctcggcacgattgccggcgacgatactatcttcactacgcctgccagcggcttttccgtaagagatctgtacgaagccattctggaactttttgaacaagagctttagtcccacttcctccgtcgtcgtacggcggaggcacctttttgtcctctcccctcgccgctttcctgtacgcctatcatttggcaaatcatgcccttaaacattcaccacatgaatgataaatcaaaaaaacgcacaaaatgtcaaatttattaagcaattgattttcttttattttttaaacgacagcggcgaaaaacagcaattttaattccataacgttataaaaaataaaatttttaatgtttttaaaaagcagaaacaattagcgtagtattaattaatcgcgtgattagtgtatacttaattttgtgatgagggtcacgaaacaaagtccccagtaaaggaattcgacgaggtaaaaatcatgaaaatcaaaaccactgttgcaacattaagtattctgtccgttctctcttttggcgctttcgccgcagaacctatcagcgcagagcaagcgcaaaaccgtgaagcaatcggatcggtttcagtcagcgctatcggctcatcgcctatggatatgaacgccatgctgagcaaaaaagcggatgaacaaggcgctacggcctaccacattaccgaagcgcgtagcggcagcaactggcacgccactgccgaactgtacaaataaaattcacctgccatcgcatataacgtgtccttgcttcgcggagatatcgcataagaaaagcccattaatccgcgaggttgaccctataaaggaataaaagatcatgaaaacgaaatacattatcgcatcactcggcctggccactctgctctctttcggcgcaaatgccgcagtacatcaggtcaacgcggaacaggcgcagaatctgcaaccgatgggcaccatttccgtctcgcagattggtagtacgccaatggatatgcgccaggagatcgtcgctaaagctgaaaaagcaggcgctaatagctatcgcatcatcgaattaaaagaaggtgataactggcacgccaccgccgagttgtataagtaaaccctcgtcgtctaacccgacgacttgcccccgcctgccgggggcttttttatgctttttcaatgccggacattaaaccgtagccgcccctccagctcttcttccgcttcatcaaagagtaaaatcagcgccccgtagcgcctgcgcagtttatcaggcaggtgaacgaactcaatctctagcggtaggggtaagatatcgctcattaccgcatcccataatgtatcaagatcgcttactttctcactggcaagaccaaacgtctgcgtaaactcgcgataaaaatcgctttggtttttaatatcattaaaatcaaaagtatagacattcatagccagccaccatccccgacagacaattgtctgttttactactaagcatcattatgcagaggtttcacttccagaaacgcttttagccccggagcactcttgcgctgtttttgtatctcaaataagtatagtcataaaaaaaccgacgcttttggcatcggttcttgtgggttagctatcggtaagcgcgttctggtatttatgtaacatacccgtcaggcgtttaaccggttccgtcacctgcggcggcgcctcccagatacgtaatttctcctgatagatatccagctcatccagcaactgaccaaagtagcgtcgccgtttatcatcgcttccggcggaaataacatggtctgcggtacgacgaagctgacggtggaacactgacagatcttcattaaccggtatcggcgcgtcgcgcagacgttgatgagcaatgatcatcgttagcgccaggcggaacttcggcaaatcgccaggaaatttattcatcagcaaaaagagttgctgatataacgcaggcagacggttttctttacggcgtaccacgttggtcgtcattgccgagaccgcagcggaaacaaactgattaagcagcacgcgaccggttcgatctttggatttatcacgcaccagcaggatgacgataaacgccagcatacagccgacaatttgccccaacgcgctgtcgaggaactggctgaaatggaacgtcatcggattatccaacacaataatgttaatcgtactggccagcgcccccatcgaccccagacgccgtttctggacctcaatgccgataaagaaccccaataccgccaggctcaaacataacaacagcatactttgctgcgtattgggaataatcaccaggaaatagagcaatcccagcggcaacgccgccagagtgccataaataaaatcgatgcagaccatgcgcggattgggtaaacgcatcgccagcgaggtcaccacggcaatcatcaccatcgcgccattacccgatgtccagccggtccatagccagaataatgtccccagaatgcaggaaagcgtggtgcgccagaagttcaccatcgcatggtgacgttcagcggattccactttaactacgggctcgccttgcaggatctcttcttccgtcgcgctgattttggtgttactgatcacgccgcgtttaagcaatagatagcgcgtcgcagcgcctacccagctataaagcgtgacgggcgtttcgcgctcgccagtccagacaatgacacgccgcatccgttttaactgtctgtggacgtcctgtaccgtttcaaccggcgtctcgaacagttcccggaatgtatcggtaatcagttccggccgcgtgttttgaataagataagtttcacaggattgcgtaatcagcgtgagcgaaagcgtattcaacgctttcaggcggcggttagcgcgtacccagcgcgaagattccatattcagattacttcgcatcccctccagcgccgccgtgcgtcgcaccagatcgccccaggcgttgtcgacttcttcgctgtcgccatgcttaatacaaagctgcattagctgatattgcgctaccagtaaactgtccagttcgcgatcaacctcctgctttatcgatcgcggcgagaaaagcagatccgctaaaatagcgcagccaatgccgataacgatttcgctacagcgctcaagcgcaaattgcggcgtgagcagcggctccgtctgaatggtaatcacaatgatcagcgcagtataacctgacagtccccacgcataagagttttcgatccgtactaaagaggagatccaggtacaaaaaccggcccagacacagcacaccagaatcatcaataacggcgcgcggatcatagagataataatgataagcgcggcgatacagccaataaacgtcccgataatacgcaacattccgcgataacggatagcgccggaatagggttctccgccggcggcaaatgccgggcctgccgccacgatcgcggcggtcagcaccgcccaacgcggcgtctccagttgaaaatggaagccgataaataatgccagcacaatggcgcacgccagctttaccgcaaaacgaatgtgctggttggcaatggagaaaatgcccatgacgattaaccgaattcgcgcagccggtgcgccagtttacggaagaaggagtcctggcttgcgtcacgatcctgcttaccggtgatcacgacggttgccgtcgtaccggcaggccacaaattcccctgctgctcgtcgagccggatgcgcaccggaacacgctgggccagacgcacccattcgaggttagagtctatcgtcgccatccctttcgcatcgctggtactgctggcattcgttacccctgccgccacgctatcgacggtaccttttaatacccggttgctgccaagcggcgtgatttcggcacgatatcccggacgcacgccttccagcttggtctcttccatataggcctgcacgtaaaaagagttctttttcaccagggcgacggccgtggaaccgcgggtaataaattcaccggcataaacattgaggttagtcacccagccgtcagcaggcgcgcgaataacggtgcgctccagatcgagtttagccaggtcgcgcgtcgcctgggctttagccagttgatgcagtaccgtctgcaagacgttgttcgcctgatcgatctcttcccgggacatcgcctgtacgccgaggcgattacggcgaccggcttcctggcgtttttcctgcgccagtacctgataataggctacatcagcttccgcttccgccagcgctttttgatagcgtggctgatcgatggtaaacaggacctgatcctttttcaccagttggttatcatgcacgtttacatgggtaatcaggcccgcgacatccggggcaatagcgacgacatcggcgctaaaacgcgcgtcgcgcgtccagggagattcggtgtaatacacccaggcgcggaaaatggcgataaaggccagaataaccagtacgagggtaatggccgtacgggagagttttcttgttagtgttttcacttcaacctcaaacgaacaggcgcgatattaaataaaacagacaacaatacagcgcggtattgaacagagccggatgccagacaaaatcatagatgcccgtcggcacaagcatccgacgcaccagccaaaaaatagccagtgacaaaagcaattcgaaaaatatcggtgggaaggaaagaccaaacaccacgataacgggaaacagactcatgttgaccttgatttctgagagagagcaggcgatagattgttaagctacatcgccgcagagaagggcaagagacgccaggcgagagcgacatagctcttattcgaataatagtatattaacgtaattgttatgctgttatctatattatgtgatctaaatcacttttaagccagagtgaataatggaacgattaaaacgaatgtcggtattcgccaaagttgtcgagtttggctcttttaccgccgcagccagacagctgcaaatgagcgtatcgtccatcagccagactgtggcgaaactggaagatgagcttcaggttaaattgctcaaccgcagcacacgcagcattgggctcaccgaagctggaaaaatctattatcagggctgtcgtcgtatgctgcatgaagtgcaggatgttcacgagcagctttacgcttttaataacacgcctatcggtacattgcgtatcggctgttcttcaaccatggcgcaaaatgtgctggccgggcttaccgcaaaattattaaaagagtatcccggtctggcggtcaatctggtgacaggaattccggccccggatttaattgccgacgggctggacgtggtgatccgcgtgggcgcgctgcaagactccagcctgttttcccgtcgactcggcgcgatgccgatggttgtgtgcgccgccaagccgtacctcgctcagtacggcgtcccggaaaaacccgccgatctcagtagccattcctggctggaatatagcgtgcgcccggataatgagtttgaacttatcgcgccggaaggaatttctacccgactgattccacaggggcggttcgtcactaacgatccgatgacgctggtacgctggctgaccgccggaaccggaatcgcttatgtgccgctgatgtgggtgatcgatgagatcaatcgtggcgatctggagatcctgctgcctcgctatcagtccgatccccgtccggtgtacgcgctgtacaccgaaaaagataagctgccgcttaaagtgcaggtagtgattaacgcgttaactgactattttgtcgatgtcgcacacctgtttcagggaatgcacgggcgagggaaagaaaaataaaaacaccgggtaattgctgaagacgattgtaggtcagatgccacccgacgcagacattgcctgatggcgctgcgcttatcaggcctgggcggcacacaccacaggcctgataaggcggacagttatgcggtgccgccaaccgtcaggttatcgactttcagcgtcggctggcctacgcctaccggcagactttgaccctctttaccgcagacccccaccccgttatccagcttaaggtcgttgccgaccatggagatctgttgcatcgtttcaatgcctgatccaatcaacgtcgcgcccttcaccggcgtcgtgactttgccgttttcaatcagatacgcttccgaggtagagaacacaaacttgccggaggtgatatccacctgaccgccgccaaagttaggcgcatagatgccgtattcaacggattcgataatttcctgcggcgttgactgccccgccaacatataggtattcgtcatacgcggcatcggcagatgcgcataagattcgcgacgcccgttaccggtcggcgcagcgcccatcaggcgcgcgttcagcttgtcctgcatgtatcctttcagtacgccattttcaatcaatacgttgtactggcctggcgtaccttcatcatcgatagcaacggagccgcgacggttcatcattgtgccgtcatccactacggtgcaaagcgcggaggcaacctgctcgccgatctgaccgctaaatacagacgtcccacgacggttaaaatcaccttccagcccgtgcccgaccgcttcgtgcagcaatacgcccggccacccggcgcccagaaccaccggtaacgtccccgctggcgcagcgaccgcggagagattaaccagcgccatgcgtaccgcttctttcgcccacgcgtcagcgcgaacctcgccgtcgagatcggcaagaaaatactcataaccaaagcgaccgccgccgccgctggcgccgcgctcgcgtttaccgtcttcttccacctgcacgctaacggacaaacgcaccagtggacggacatccgccgccagcgtcccgtcggtcgccgccacgaggattaattcatatacgccggtcaggctggcgttaacttcctgcacgcgtttatcggcttctcgcgccgctttatcaacgcgtctgaggatatccagcttctcttcgcggctcatactttgcagcggatcaagggtggtgtagagcggctgatgcgctacggcggcgagcgtttttaccttgccttcgccgttctcgcgtacaatggttcgcgctgcctgcgcactctgctccagcgccaggaggcttatctgatcagcataagcaaaaccggttttttcgccgctaatggcgcgaacgccaacgccctggtcgatattatatgaaccatctttaatgatgcggtcttctaaaacccaggattcgtgatagctcgactgaaaatagaggtcgccataatcaagacggcgttcggccagttggcccaaaatagcgaacagatcctgatggttcaggccattcgccgctagcaattgttcacttaccaggttcagactcatcgtttttgctactcattgatttctgccggatggcggttcacgccttatccggactacgttgttagattgtgcaaaccggataaacgcagcgccgtccggcatgactatttactgagagtggggcaattcctcgcccccgtcaaatcattgctggctttcttttctcggttggcgcagaacttcgttgatctgcggcgcatcgaccggaccggtaatgcgataacgcagaatggagaccttgctccatagcggccccaacactttactggcggcaaataccgccgcgccgacaatcgggttaacggcaaacgcggcggcgacgcccacggtggcggaaatttccggcgcgacaacggcctccatatcaagacgacgacgcaccagatcaacagaacctttcattgcaatatccgcttccagcccatccaccagcgtatcgtcagtatgtaggacgccatctttaatccacgcggtactatgaatagagtcgaaatagaagccctcgctaaaggtatctctgaagtcaaaccgcagcttacgcagcaacgcatcaaaactgagcagccgcagtagctgtccggcatgaccgctactgagatcagtaaactcgcctttacccagacgcgtgcgtaaaatcccgttgagcgtggcttcatcaggttgccagggcgggtttcgccagtgcagatcgtaatctacgttaaaagacgcgttctggattggcgtcgagataccgaagaacccggcagccgtgtcgaggttactaccatgcagactacctttcagcgaggttcgttcattacccggcgcattcacccactcgccgttcgctttcaaacgggcgagtccggtatcgatcaggccattcgccagagtcagcgtattgcctttgatggcgaaatcgccatcaatacgcccatatttttgcccccatagccagcactcttcgcagcgaagctgtaagtccggccagccacggaagctaatcgtgttcgccgaagccaacggcgatgtcggcgttggtgacgaggcgtgcgtttttgcgacgccagggttgtagtacaggtacttaatgttcgccagccacggcgcatggttgcgcatgagcagcgtggcgttcacctcacggccctgcgcttcaatttttgttccgttcagcgagggggctgaaacgacgctcaaattgttccactgctgaccgcccagcgatagcgcgggagtacgcaacgtgacgcgttgaggaaactcggccgaactgctcacgttatccgccgcgcctttctggaataacgccagccattgcgcgccatccagcgccggcagattgagctcaacgccttgttgagcaggtaatggcggaatcgtccggctgtccgtcgtccagatagcccgatccaacgtcagcttctgatttaataaccagcggctgttaaagtgatttttactccctgcgctccccgttagcgcaaaacttttcaggttgccgtcagcctgaatgttcaccggaatggcttcgcctgcgggtttatttagcggagaaggtaagtgactgctcacatttctcagatcgccattcagctcgatgtgataagtggtgtcagcgtgatacggaagatcgatgccgactttaccattccacgtcacgctgccgctcagggcgtcattcagttgcggcggtaagacgcccatacgcgttggctgccagttaccgttcaggttgacggcgacctgataggcttttgccccttccgtcgtactgaaatccaggttcagcggctgattaaaccagtttgccgtcagcggcccgctttttagcgcgccattcacaaagctgaatttaccgttcagatttttgagcgtgctgtttagcggcttaataaacagactgttattacgcaacgagacatcaccctcagcggtaacctgttcgccatccagcggaatatcaagatgtaagcgagcattcacatcgccatctaactggagctccgccagcgtcgagccaagcgagtcttttagtggcgtctcgtcgaaataaggcccaacggcttttcccggcccgttaatatcggcatcaatgagcagtttctctttggaataatccggaatcgccgccgcgagtttgctggccttcaccccgcccaaatcgacgctatccgaacgcatccacaggccgtcgttcaggaaatccagttcaatgttgagattttttagcgccggccagtcgggttgaaaggcaaacgtcgcattgcgtagcggcaccagcacttcaaactgaccttcgttatgcttatagggaaagaggtgcgggttaccaccgtaaaccaacgtggcgttatccgcctcgccgccctgaattgcgccgctaaggtaatcgaccagcgctttgcccatcaggttttccggaaaatagcgccacgcctgagatccatcgtcggtactgattccggccagaatacccagccacggttcgtcgcccgtcggttgcagatagcggaacccgccgcgcgcgtgtaccgcctttgctttgacgtcaatgtcgcggccatcaagctgaaagccgttctcattcttcaaccaactaagcgtcgcgacgccgttttcaatttccagcggcgcgcgaaaaacggtttcatagggcatcttagcctgctgcatcgcaaccttcatctgcccgtcttctacgcttcccgccagcgtaccggaaaaatgttccgcgccgggcaacagcttccactgtttccaggcaagattttcccacgatgcctgaaaacgcgttttttcggtggcctgtagcggaatatccagcgccagtgtggcgatctttccgctcggctgcgtagcctgccatatttcgcccagcacaggcgacagtttagccgccagcggacgtaatgcttccagccccgccagttcaagattactggcgcgaatgcgtagctcatcgctacgtgtgtgattctcgccgccgacgtcctgctgcgggagccaggccacggttaaggctccgctcggccagggtttaccatcaagcgtaatccgtgtgtccggaatataaaactgccagcccggctgctcacggctaatctgcgccgtcaggttatcgacagacaacgtgtgcgtcgtgttatcgcccaaccagcttgcgccgccctgtttcagccagacgtctcctccggcgatttcacctttactgagcgtcatccagccttccagactgaaacgcgccgtctggagcgccacattatcctgcatccatttgcccagccacggcttgacgtcaatatcgtcggcctgtaaccagactctgccgttatttagcaaaccgtcgtcatcgcgtaaatccatccgcacctgcatcacgccgtgctgcccggtcaggctggagagactgacctcgccttcggcgcggtgccgctctttgccgtttagccaggtaagctgtgggatcgccagctccgcgcgttgtccggaaagcgtcagaaaactgatttggctatcgcgcagatcgaaatgatcgaactgccgcaggaaaagatcgcttaaacggctggtttcgatgccttcgccgtcgctgctttgaagaggcgtgttggtgcggaaattgagttgccagaaggtcaggtcgcgaaactgccagcgcatatgcaacaggctttgccagacgtccagcgccagcgtaacgcgttttatcgacagttcgccgccatctttcagggcggcatgaatattatgcgcttccagcgtagggccaaaattttgccagcttgcggagagttggctggcggccaccggcacgccggtcacagactcaattttattcaggatagccggacgccaggcgtcaagatgaggcaacgccaggcgcagcccgctaaccagcagcgctgcaatgacgatgagcgcggctccagtgagcaataaaatccccggcaatcgcctcacgcgtctctccttgtctgccaaaaaatacgactcacaaccttgctttgccggacggcggcgtgaacgccttatccggcctgcaaatactcgtacgggtcgcggtcttttacatcattacgacgtcaaactgctcctggttataaagcggttcgacctgaactttaacctgtttgccgacaaagatttcgacttccgccagcgcgtgtgattcttcgcctttcagcgcttccgccaccgcaggagaagcataaaccaggaagcgatcggagtcataagcgtgatgaacacgtacaatttcacgcatgatctcatagcagacggtttccaccgtttttaccgtcccgcggccatgacaggttggacattcgttacaaagcacatgttccacgctttcacgagtccgtttacgggtcatttccaccagccccagcggcgaaaaaccgttaatactggttttcacgcgatccttacttaacgcctgttccagcgaatgcagcacccggcggcgatgatcttcattattcatatcgataaaatcgataatgataatgccgcccagattacgcaggcgtagctggcgggcaatggcctgagtcgcttcaatattggtattaaaaatggtgtcgtcgagattacggtgtccgacaaacgcgccggtattgatatctaccgtcgtcatcgcttcggtttggtcgataatcagataaccgccagacttgagttcaaccttacgctccagcgcgcgctggatctcattttccacgtcataaagatcgaagatcggctgatggccactgtaatgctccagcttactggtcatttccgggatgtattctgcggtaaactccagcagcgactcataggtcagacgtgagtcgacgcgaattcggtccaactgcgcatcggcgaaatcgcgcagcacgcgctgcgccagcgccagttcgccatacatctggtagcgcgtttgcggacgctttttgcgctccattactttcgtccagacgcgcttgagataggcggcgtcagacgcgagatcctcttcacacacgccttccgctgcggtacgaataataaacccgccctgttcgtcgcagtattccgccaccacctttttcaggcgctcgcgttcactttcgctttcgatgcgctgggaaacgccaacgtgtgacgcgccgggcataaaaacaaggtaacgggagggcaacgtgatgtccgtggtcaaacgcgcgcctttcgtgccgagcggatctttcactacctgcaccatcagatcctgtccctgacgcaccagttcggagatatcgcgcacggtaaactgtttttgctcgtcgcccgccacgcattcggtatgcggcataatgtcggaagcgtgaagaaatgcggctttatccagcccaatatctacaaaagccgcctgcatacctggaagtacacgacttacacgacctttgtagatattgcctacgattccgcgtcgcgcttcgcgctcaatatggatttcctgaagaataccgccatcaatgtacgccacgcgcgtttccgatggcgttacgtttaccaacaattcagccgtcatgtttatcccttttatcacgcagtgcgttaaaatgactcaacaactcatacgtttcaaccagcggtaagccgaccacggcgtgatagctgccatttatcttcctgacaaaacagccaccccgcccctgaataccgtatgcacctgctttatctaaaggctcgccgctggcgacatagccagtaatatcctgcgcagaaagcgtgcggaaagtcacctccgttaccaccagacaatccagcgtctgctgcgagtccgcaagcgcaacagcagtcatcacctgatgcgtatttccggaaagcaaacgcagcatttctgcggcatgagcggcgtcgcgcggcttttccagcacctcgccgtttaacacgactatcgtatccgcgcccaacaccggcagatcacggggaaccagcgccacgccagcctgcgccttttcgcgcgccagccgaacaacatactgctgcgcgctttcctgagcacgccgttgctcttcaataccaggcacgacctgctcgaatgaaaatccaagttgagtcaataattcctggcgacgcggggaaccggaagcaagatacagagttgtcatatcgacctttattgcacagcaaactgctggcgtactttacgcatcagcaaaaagagccagggccacagcacgccattgactacactactccagaacacttccggtctgaaagagacgttgatcactaaaaactcggcccagaaaacaataatgtccacggccagtgaaagcaacattaccaccagcgcctgctgccagagcgccaggttacggaagagctggaatttcagagcgaccagataggcgacaatactcatcgacagagcgcgcacgccaagtgtggaaccgctgatgagatcaagtatggcacccatcacaaatcccgtccccacatttacgcggtgcggcagggccagaatccagtacagtaagatgagcaaaacccagtttggccggaaaacaatgatgtcgtccggccagggcatgatttgcagcaacagcgcaataagaaacgagagccagataacccagcgcccctggctacgatagctcgccaccattaccctcccggcgcacgcgcaggcggcgtggtcgcgcccgaaggcgatggttgcgttgataccggcgccgtctggcccgcagatggctgagtaatccccgtcgccgggtccggcactggcgccggcggccccatcgcatccggagaaggcaacacctgcggcatcatctgcatcaggcgctcattggcgacgcggtgaacctcttccggcgtcatcggattggcgccgttacgatcggctccccacaacagcagcagatagcgtaaacgctgcaaacccgcggttggacgtgcctgaatgacggtataggcgcgctgagtgtccagcttgacggaggagaccaccgccaccggatacccttccgggaaacgcccaccaagtccggacgttaccagcacatcgccaacgcgaatatcggtattggcgggcagatgttcaagctgaagatcgtcagtgcagccgttaccggcggcaatcacgcggatgtcattgcgcagtacctgaatcggcagcgcatgagtcgcatcgcaaatcagcagtacgcgactggtcagtttcgccacggcgacaacctgccctacgacgcctttgtcgctaatgaccggttgaccttcatatacgccattaacgctgcctttatcgataacgacctgatcgctgtaaggatcgttaaccgttgaaataacctgagtcaccattttctgctcgtcctgacgcagcggcgaccccagcagctcgcgcaaccgcgcgttctcctgtttgtactgccccagcatcagcaggtcgctgttttttagcagtaattcctggcgcagcgcccgattttccagctcaagctggtcgcgagaagccagcgtttgcgacacgctgtcgagcagttcacgagggccgtttgaaataaaatagaaaggactgacggcagtgtccatgtacgttcggatttgactgaacgtccccaggcggctgtcggcaatgataacgccgagcgccaccagcaccgccagaataaggcgaatctgtagcgacgggccacggctaaaaattggcttcataggctatgcgtattctcgcgtcggagaggcaggacaatccagggataatcctgcccgtatccaactactcttcgctgaacaggtcgccgccgtgcatatcgatcatttccagcgccttgccgccgccgcgcgccacacaggtcagcggatcttcagcaaccacgacaggaatgcccgtctcttccattaacagacggtcaaggttacgcagcagcgcgccgccgccggtgagcaccataccgcgctcggagatgtctgacgccagctccggcggacactgttccagcgccaccattaccgcgctgacgataccggtcaacggttcctgcaacgcttccagaatctcgtttgagttcagggtaaagccgcgtggaacgccttccgccaggttacggccacgcacttcgatctcgcggacttcgtcgcccggataagcggaaccgatttcgtgtttaatacgttctgcggtggcttcaccaatcagagaaccgtagttacgacgaacgtaattaatgatggcttcgtcgaaacggtcaccaccaatacggacagaagaagagtaaaccacgccgttcagggagatcacggcaacttcagtggtaccaccaccgatatccacaaccattgaaccggttgcttcagaaactggcagacctgcgccgatcgcggccgccatcggctcttcgatcaaaaagacttcacgggcgcctgcgccctgagcggattcacgaattgcgcggcgttctacctgcgtcgcgccgaccggcacgcataccagtacgcgcgggcttgggcgcataaagctgttgctgtgcacttgtttaataaagtgctggagcattttttcggtcacaaagaagtcagcgataacgccgtctttcatcggacggatcgcagcgatattgcccggcgtacggcccagcatctgcttcgcatcatgaccgactgcagccacgcttttcggcgaaccggcacgatcctgacgaatggccacaacggaaggctcattcaatacgatgccttgtccttttacataaatgagggtattcgcggtacccaggtcaatggacaggtcattggaaaacatgccacgaaattttttcaacatactaagggataatcctgaaagctggggcggaaaacaaaatccgcttactttaccaaccacacgcagcagcgacaaggcgcaaaaatcatctgctacggtgaaaattagtgcagttcgtttcctttgttacaaatctcggcctgagtccctcagggctgaaaaaatcagcagcaatcctcgccttcgtttgcaacctgtcaaaggtcattcacctgcatatttgctgcaacaatctggcgagcagacaagcacacccccatgaggcgcagcgcgcgttattctacgtgaaaacaaattaaacggcaggttaaaccgagtatctttgcgaatattttttcacgtttgtgtcaagtagttgggaggaggcaaaaaaatcaccctgcccgccagccacgccgcgttttgtcagcgtctgccactcgccgcgcgaacggacgcctgtcgcgtaaacctgcgtaggcgtgcccgcgcaggcctctaccagactttgaaccagaagctggttttccgttcgcttctcaatgtttctgaccagactcggatgcagcttgagtaattccacattgagcgctttaatccagctcgtgctaaccagcgtcaaacccgcctgtgtcaccgccacccgaacgccaagcgcattgactaagcgaaggatgggttgtaaccgactgatgtgttgacaaacatctgcctccgcaagttcaataattatgcgatttcgctgtgatttttcacactgcattaacgtatcgcgcaaccagcgctgaaaacgcggacgaatcagcgactcaaccgtcaactgcattgccagattttcatccggccagtagcccagcaacgtaatcaggcggctaatttgtaatctgtcatactcttccgataaaccaaattgcagcaccatcggcatatactccgccgagctcacctcttctttaccgtcatagatgcgacacatcaattcccgatgatgtacgcgaccttctcgcgtgaccgctggtttttgataaagtcgcggtccaccccggttcagcatctgctcaatcaatgtgcgccagcgcacattgccgcgccctttttccggcagagtgtcgtcgtagatagcccagctatttcccccctgcagggcggcattccgcgccgcggcttcagcatgttccatcacctgctcggtggactgtccgctgcgccaggcgcaaatgccgatatgtaccatatcgtcacgatcgagcattttgttagccggtagcgcatcgacagcttttaaaagttgtccggcaatactttccgcttctttcagcgttcgatgcggtagcagcacggcaaagtcgctgcggtgataacgcgccagcagcgagccagggtaacgcataataaatgtcgatagcagattgataagcataaacatctgctcttccgcctgattgcctcccaggctgtcgcgcagaagattgaagtctggcaagcggatcatcatcaccacgccatgcactcccactttttcctgatcttccagcagcgtcgccagttggttatcaaagaacagacggttaccgagtccggttttggtgtcctgcgcggcgtaggagcgaatgagggtgtccaggcggctacgctgttcgtgagcaaactgaatttcggaaagcaatacatcaagcgcgctactggtgcgcgctggccattcgtaaacagaaccgcggacattcgccccgcgttcgccgttcagaatacgcgttgagcgaatttccagaagctcttgcccggaaagctgccgctgcagccagcgcaccgataaaaacaaaatcagaacgataaaaccgatcgccagcgttagcggcgccgtggtgatcagtgagtgaaaatagttacccatcgggtcctgataagccagacgtagcgacattcctggatgttttatcagcggtacgaccagctcgcgatacatgtcgctggtgccggctggccgataacctctggcacgagaatggctgtagacgctgcgctccccctgcaacagatcgacacgcacaatatcggaagcgatcatgagttcgtcgatttgcggcgtcagcgagacaatatcatgggtcaccaggtgcgtatcaatggctgtcgccgtcgcctgcacacggctgacatacttatactgtacggcgttataaaagcttagcgagcaacctatcagagtcacgaagatcgttaaccccgtgagcagcgtgataaaagctgagaatttcgtcgttaatcgcatccttgagttaactccgacggttataaacagtatgaaaaagcgaatctgaaggcggaattcgccacggcgcgcaatgaagcaggcatactaccaaaatggatctatctggcaatttattgcgttgcatcggcatcacgttttaattagcgagtatagtcttcgtagctatttttccaatctaccatgtaaagtgaggacaggttatgcaggcgttgatcttagaacagcaggacggtaaaaccctcgcatccgtgcaacatctcgaagagagtcaactgccggcaggtgatgtgacggtggatgtccactggtccagcctgaattataaagatgctctggctatcaccggaaaagggaaaattatccgtcattttccgatgattcctggtattgatttcgccggcaccgttcacgcaagcgaagatcctcgctttcatgcaggccaggaagtactactgactggctggggcgtgggcgaaaaccactggggcggcctggccgaacgcgcacgcgttaaaggcgactggctggtcgcgctgcctgcgggactgagcagccgtaacgccatgatcatcggcaccgccggttttaccgccatgctgtgcgtcatggcgcttgaagatgcaggtattcgcccgcaagacggtgaggttgtcgtcaccggtgccagcggcggcgtgggcagcactgccgttgcattactgcataagctgggctatcaggttgcagcagtatcaggacgtgaaagcacccacggctatcttaagagcctgggagctaaccgtattctcagccgcgatgagtttgctgaatctcgcccgttggaaaaacagctatgggccggtgcaattgataccgttggcgataaagtgctggcgaaagtgctggcacagatgaactatggcggttgcgtggccgcctgcggcctagcgggcggcttcgcgctgccgaccaccgttatgccattcattctgcgtaatgtgcgtttgcaaggggtagactcggtgatgaccccaccggcacgtcgcgcagaagcctgggcgcgtttggttaaggatctgccggaatcgttctatgctcaggccgccacagagattacgctggcggatgcgccgaagttcgccgatgccatcatcaataatcaggttcagggccgtacgctggtgaagataaaataacgtcacgtataaaaaaatttacacttaattaactatttatttttacacattgacacactccctgtcatattcactacacgccatgttgtggtgggtagaccgggagtctgtgatgaaaaagatacgtccattaacagaagccgatgtgactgcggaatcggctttttttatgcagcgccgacaggtgctaaaagcattaggcatcagcgcggccgccttatccttaccctcaacggcgcaggccgatctcttcagttggtttaaaggcaacgatcgtccgaaagcgcctgccggtaaaccgcttgagtttagtcagcctgccgcctggcgaagcgatttagcgttaacgccggaagataaggtgacgggctacaacaatttctatgagtttggccttgataaagccgacccggcggccaatgccggaagtctgaaaaccgaaccgtggacgttgaaaatcagcggggaagtcgcgaagccatttacgctggattacgacgatttaacacatcgtttcccattagaagagcgtatctatcgaatgcgctgcgtcgaagcgtggtccatggtcgtgccgtggattggtttccctttatataagctactcgcgcaggcacagcccaccagccacgctaaatatgtggcattcgaaacgctatacgcgccggatgatatgccaggacagaaagatcgctttattggcggcggactgaaatacccttatgtcgaagggctacgtctggacgaagccatgcatccgctgactctgatgaccgttggcgtctatggtaaggcgttacccccgcaaaacggcgcgcctattcgactcatcgttccatggaagtatggttttaaaggtattaaatctattgtcagcattaaactcacccgcgaacgtccgccaaccacctggaatttgtcggctcccaacgaatatggtttttatgccaatgtgaacccgcatgtggatcatccacgctggtctcaggctaccgaacgctttattggttcaggcggtatccttgatgtgcaaaggcagccgacgctgctgtttaacggctacgccaatgaagtcgcttcgctgtatcgcggtctcaatttgcgggagaatttttaagtgcgtctgacagcaaaacagataacctggctaaaagtttgtctgcatcttgccggttttttgccgcttctgtggctcttttgggcgataaatcacggtggactcagcgcagacccggtaaaggatatccaacactttaccggcagaaccgcgctcaaatttttgctcgccaccttgctggtttcaccgctggcgcgctacgctaaacagccattattgatacgcacacgccgcctgttaggattatggtgtttcgtttgggctacgctgcatttaaccagctatgccttactggaactggggatacataacctggcgctgttaggaagcgagttgatttcacgcccttatttgacgcttgggatcattagctggctggtgttattggcgctgacgttgacctcaacgcaatttgcgcagcgtaaattgggcaaacgctggcaaacactgcataacgtcgtctatcttgtcgcgatcctggctcccatacattacctgtggtcggtaaagattttatcaccgcaaccggtcatctacgcggcattagcgttagcccttttagcgttgcgttaccggaagtttcgccagtggtggcgctagtttggtgaactgtgcggtcgattgcaaaacgcaaaacaggtaatgtcctttttatgtttcgggttgattatcttccctgataagaccagtatttagctgccaattgcgacgaaatagttataatgtgcgactttacattgcccaacggcgattttcgttcgcagaaagggtgacaatcgagcaatgaaggtatattttgttttttgcccgaaaatggcagaagatagccacacaatgactggcaaatcatgaatttcaccttcgggtgctacggcataacaggcaaatcaaagatgcgcggtattttacccgcggcagtcattcacatgctttacagacggcgctaaaacgcctgtcacaatcacactaaacaaagagtacggaacccactcatggatattcgtaagattaaaaaactgatcgagctggttgaagaatcaggtatctccgaactggaaatttctgaaggcgaagaatctgttcgcatcagccgcacaacggcaaacgccggttttccggtgatgcagcaggcttatgcggcgccgatgatgcagcaacccgctctgtctaacgctgtcgcgccagcggctactccagcaatggaagcgcctgccgcagcggaaatcagtggtcacatcgtacgctccccaatggttggtactttctaccgcaccccaagcccggacgcgaaagcgttcatcgaagtgggccagaaagtgaacgtgggcgataccctgtgcatcgttgaagccatgaaaatgatgaaccagatcgaagctgacaaagcaggtactgtgaaagcgattctggtcgaaagtggtcaaccggtagaatttgacgagccactggtcgtcatcgagtaacgaggcgaacatgttggataaaattgtcatcgccaaccgcggcgagatcgcactacgtattcttcgagcctgtaaagaactcggcatcaagaccgtcgctgtgcactcaagcgcggatcgcgatttaaaacacgtattgctggcggatgagacggtctgtattggtccggcaccgtccgtaaaaagttatctgaacatcccggctatcattagcgccgctgaaatcaccggcgcggtggcaatccacccgggttacggcttcctttctgagaacgccaattttgccgagcaggttgaacgctccggctttatctttatcggcccgaaagcggacaccatccgcctgatgggcgataaagtgtccgcgattaccgcgatgaaaaaagcgggcgtgccgaccgtaccaggatctgacggcccgctgggcgacgatatgaatgcgaaccgcgctcatgccaaacgtattggctatccggtgatcatcaaagcgtccggcggcggcggcggccgcggtatgcgcgtagttcgtagcgatgctgaactggcgcagtccatctccatgaccaaagcggaagcgaaagcagctttcagcaacgacatggtatacatggaaaaatacctggaaaatccacgccacatcgaaattcaggtgctggcggacggccagggcaacgctatctatctggcggaacgcgactgttccatgcagcgtcgccaccagaaagtggttgaagaagccccggcgccaggcattacgccggaactgcgtcgctatatcggcgaacgctgcgcgaaagcgtgcgtagacatcggctatcgcggcgcagggacgttcgaattcctgttcgaaaacggcgagttctatttcatcgaaatgaacacccgtattcaggttgaacacccggtgactgaaatgattaccggcgtcgatttgatcaaagagcagttgcgcatcgcggcgggtcagccgctgtcgatcacacaggacgaagttgtcgttcgaggccatgcggtagaatgccgtatcaatgccgaagatccgaacaccttcctgccaagcccaggcaaaatcacgcgcttccatgcgcctggcggctttggcgttcgttgggaatcccatatctacgcgggctacacggtgccgccgtactatgattccatgatcggcaaactcatctgctacggtgaaaaccgcgacgtggcgattgcccgtatgaaaaatgccctgcaggaactgattatcgatggtatcaaaaccaatatcgatctgcagacccgcatcatgaatgacgagcacttccagcacggtggaaccaacatccactatctggagaaaaaactcggtcttcaggaaaagtaatcgcacgttaatctcaaaaggccggtgaatccggccttttttatttctggggatagcgatgccccatcatgtacaattcccgctttcttcacccataagggacaaaaaatggacgctcgttttgttcaggcccataaagaggcgcgctgggcgctgtggctgaccctttgctatctggcggcatggttagtggctgcttacttacctggagactcgccgggaatcaccggtctgccgcactggttcgagatggcctgcttattgacgccgctggtctttattttgctgtgctgggcgatggtgaaattcatttatcgcgatatttcgctggaggatgacgatgcagcttgaggtcattctaccgctggtagcctatctggtcgtggtcttcggggtctcgatttacgctatgcgcaagcgtaccgccggcacctttttaaacgaatattttcttggcagccgttcgatgggcgggatcgtgctcgcgatgacgcttaccgccacctatattagcgccagttcatttatcggcggtcccggcgcggcttataaatacggtctgggctgggtcttgctggcgatgatccagcttcccgccgtctggctttcactgggtattctgggtaaaaaattcgctatcctggcgcgtcgctataatgccgtcacgcttaacgatatgctattcgctcgttaccaaagccgcctgctggtgtggttggcaagcctgagtttattggtcgcgtttattggcgcaatgaccgtacaatttatcggcggcgcgcgactgctggaaaccgcggcgggaattccctacgaaaccggcctgctaatatttggcgtcagtatcgcactctatacggcgtttggcggctttcgcgccagcgtacttaacgatacgctacagggcctggtgatgctggtcggcacgatagtgctgctggtgggcgtgatccatgcggcgggcggtctaagtcaggccgttgacacgctgcacgctctcgaccccaaactggtaacgccgcagggcgccgatgacatactttctcccgcctttatgacctctttttgggtactggtctgttttggtgtgattggcctgccgcatacggcggtgcgctgcatctcctataaagacagtaaagcggtacaccggggcattattatcggtacgattgtcgtggcgattttaatgttcgggatgcaccttgccggcgcgctgggtcgcgcggtgcttccggatctgacggtgccggatctggtgatcccaacgctaatggtgaaagttttgccgccgtttgccgccgggatcttcctcgctgcgccaatggcggcgatcatgtcaacaattaacgcccaactgctgcaaagttccgcgacgatcattaaagatctctatctcaacctgcgccccgatcagatgcaaaatgagatccggctgaagcgtatgtcggcagcgattacattactgctaggcgcgctgttgctgctggccgcatggaaaccgccagagatgatcatttggctcaacctgctggcgtttggcggcctggaagcggtgttcttatggccgctggtattgggcctttactgggagcgggcaaacgcggcaggcgcattaagcgccatgatcgtgggcggcgtgctatatgccctgcttgccacatttaatattcagtacctgggctttcatccgattgtgcccgcgttactgttaagtttattggcttttctgatcggaaaccgattcggctcttccgcttcgcaagccaccgtattgtctactgataaataaagagttttgccatgccatggatccaattgaaactgaataccaccggcgcgaatgctgaagagctgagtgatgcgctgatggaagcgggcgccgtttccattacctttcaggatacgcacgatacgccggtttttgagccgttgccgggcgaaacccgtctgtggggcgataccgatgtgatcggtctgttcgacgccgaaaccgacatgaaagacgttgtcgcgattctggagcaacatccgctgctgggtgccggatttgcccataaaatcgaacaactggaagataaagactgggaacgcgaatggatggataatttccatccgatgcgttttggcgagcgtctgtggatttgtcccagctggcgtgacattccggacgagaatgccgtcaacgtgatgctcgacccgggactggcgttcggtacgggtacgcaccccaccacctctttatgtctgcaatggctggacgggctcgatctcaacggcaaaaccgtgatcgactttggctgcggttcaggcattctagcgattgccgcgctgaaactgggagcggcaaaggcgattggtattgatatcgatccgcaagctattcaggccagtcgcgataatgctgaacgcaacggcgtgtctgaccggctggagctgtacctgccgaaagaccagccagaagccatgaaagccgacgtggtcgtcgctaacatcctggcaggcccattacgcgaactggccccgttaatcagcgtactgcccgttgagggcggtctgctggggctttcaggtattctcgccagccaggcggaaagcgtctgcgatgcttacgccgagcttttcactctcgacccggtcgtcgaaaaagaagaatggtgccgcattactggccgtaagaaataattcttgtcagcgtggtcgcccggccacgcttttctccacacaactgccttaacgcctttcaggcaccgagacatcattaaattcatcaaatgaatgcctgaaataacttctttgtcactatccgtctggataaacagctgctaccagcggacaaaagatactggcgttttaacgggtcgcagccatcgccctcgtacttagtaatgctgtccgggttgttctgcagcatccgctaaccctctcttcagcgcagctggaaaaatttatccgtgccattcatgaacacaaaagcgcatctgtgcgcccccttccgactggcaatggagaaaaatcacgcgcagcgggaagtgatcttgtcctgaaacgagacggcgatcccattcatttggggtaattagcttataaaaaaagcagattattccgcttatcttgtttctggacgaagaaatagagagaagttacgggaatttgtaagcgcgtacaaaaccgccgacaataaataaccctatgattttaatgaattataaatttattttgctgtttttaagcacgattcattgatctacaacagtggattgttcaaagtttggcctttcatctcgtgcaaaaaatgcgtaatatacgccgccttgcagtcacagtatggtcatttcttaactcatgcgcatcggacaatatcagctcagaaatcgcctgatcgcagcgcccatggctggcattactgacagacctttccggacgctgtgctatgagatgggagcaggattgacagtatccgagatgatgtcttctaacccgcaagtgtgggaaagcgataaatctcgtttacggatggtgcacgttgatgagccaggaattcgcacggtgcaaattgccggtagcgaccctgttgagatggccgatgccgcacgtattaacgtggaaagcggcgcccagattattgatatcaatatggggtgcccggcgaagaaagtgaatcgtaagctggcaggttcagccctcttgcagtacccggatttagtgaagtctatactcatcggggtcgtaaacgcagtggacgttcctgtgactctcaagattcgcaccggctgggcgccggaacaccgtaactgcgtagagattgcccaactggctgaagattgtggtattcaggctctgaccatccatggccgcacccgcgcctgtttgttcaacggagaagctgaatacgacagtattcgggcagttaagcagaaagtttccattccgattatcgcgaatggcgacattactaacccgcataaagccagagctgttctcgactatacaggggcggatgccctgatgataggccgcgcagctcagggaagaccctggatctttcgggaaatccagcattatctggacactggggagctgcttccgccgctgccgctggcagaggtaaagcgcttgctttgcacgcatgttcgggaactgcatgacttttacggtcaggcaaaagggtaccgaatcgcgcgtaaacacgtctcctggtatctccaggagcacgctccagacgaccagtttcggcgcacattcaacgctattgaggacgccagcgaacagctggaggcgttggaggcatacttcgaaaattttgcgtaaacagaaataaagagctgacagaactatgttcgaacaacgcgtaaattctgacgtactgaccgtttctaccgttaactctcaggatcaggtaacccaaaaacccctgcgtgactcggttaaacaggcactgaagaactattttgctcaactgaatggtcaggacgttaatgacctgtatgagctggtactggctgaagtagaacagcccctgttggacatggtgatgcaatacacccgtggtaaccagacccgtgctgctctgatgatgggcatcaaccgtggtacgctgcgtaaaaaattaaaaaaatacggcatgaactaatttcgattagctaactgcttgtttaaaaaggcgctactcggcatggggaagcgccttttttatacgcatcacatggaatttggtcatgaaagcggaatgtgaacctcagtactttggcgatgaatcgaagaagattattcacggtgacgcgctaacagaacttaaaaaactgccttctgaaagcattgacttaatttttgccgatccgccttacaatatcggaaaagatttcgacggtatggtggagtcctgggacgaagcgtcttttctggcctggctgtatgaatgcattgatgagtgccaccgcgtactgaagaaacacggcaccatgtacatcatgaatagcacagaaaatatgccgtatatcgatctcaaatgccgaacgctttttaccatcaaaagccgtatcgtctggtcctatgatagttccggggtgcaggcgaaaaaatactttggttctatgtatgaaccgatcctgatgatggtaaaaaacccgaaaagctatacctttaaccgtgatgcgattctggtcgaaaccactacgggcgctaagcgcgcgctaatcgattatcgaaaaaacccgccccaaccatacaatcagaaaaaagtgccgggcaacgtctggtcatttcctcgcgtacgttatctgatggatgaatatgaaaaccatcctacgcaaaagcccagcgcgctgttaaaacggatcatactggcctcttctaacccgagcgataccgtattggaccctttcgcgggcagtttcaccacaggcgctgtcgcagcggcgtcaggtcgtaagtttatcggtattgaactcaataatgagtacgtaaaaatggggctcagaagattgagcgtcacttcgcattattcagaaaatgaacttgcaaaagtcaaaaagagaaaaacacaaaacctgtccaaaaagcagcgaaatgtcgggataaacgcgctatcttcagagaagtaaaagcattgtaagtccgcttttcagcgtcaaaatttcatgtatattcccagcacgcatgggcatgaatacacaggatttgacgatgatacgtaagtattggtggctggttgtttttgccgtctccgtttttctttttgatgcgcttttgatgcaatggatcgaattgatggcaactgaacaggataagtgccgaaacatggattcggttaaccctctcaaattgatcaattgtaccgatctggagtagcgaaccgggcgatttaacctatgattatttatcacccggatttcttttatcccttataaaaacagggaattaaaacacgttgaggataaaagaaggggtgatactgtctcgtcctgttcttttcctgcataaccaatgagctaatgatacatgccggttagtgagtacaaccacatccttgtggcggtttcatttgctgtcgctatttttgcgtcctataccgcattaaatatggccggacgcgtagccggaagcgcccgatcaaacgccagaatatggctaatgggcggcggcttcgcgctgggcgtcggtatttgggcgatgcattttgtcgggatgctggcgatggatcacgcgatgaacatgcgcttcgatccgttcctcaccggcctctccatgctgatcgcgatcggctcctccctgtttgcgctatggctggtcagcgctgaaaaactgcgcctgcgccgtttactgccgggcgcgctggtgatgggactgggcatcagcgcaatgcattataccgggatggcggcgctgcaatttgcttccattatcgtctggaatagcgcgtgggttgccctctctatcattatcgcgctactggcgtcctgcggcgcgctgtggctcacgttccgcctgcgtcatgagggaacagatgtcgccctgaggcgagcaggcgccgcggtattaatggggatagctatcgccggcatgcattacgccggcatgaaggccgcacactttccccaaaactggccgatggagcatcgtggcgtcgatagcaactggctggctgttcttgtcagcgtggtcgcgctgactatcctgggtattactctgctggtttctttatttgacgcccggcttcaggcccgtaccgcactacttgcctcttcgctggcgcaggcgaaccaggaactggcgcagttggcgctgcatgatacgctcacccgtttaccaaaccgggtgcttcttgaggatcgtctggaacaggccatcagcaaagcgaatcgggaaaacacgtctttcgcgctactgtttatggatctggatggctttaaaaccgttaatgacgcttatggtcatgatatcggcgataagctactggtagcggtcacgcatcgtctgaaccaaccgctgagcgggcagtttaccctggcgcggattggcggcgacgaatttgtgctgcttgcagaagtcagcgcgcctgacgaagcggcttcccttgccagcgcgctggtacattcgatagatgcgccctttacaatagatccgtacgaactggtcgtcacccttagcgtgggaatagcgctctatccgctggacggaaaaaacgaacgggaactgatgttcaacgccgatgccgcaatgtaccacacgaaacatacggggcgtaacggataccatttctttcagccatcaatgaatatgctggcgcaaacccaacttcagctaatgaatgacctgtggctggcgctggaaagacaagagctcaggctagtgtatcagcctaaatttcaggctcctgccggccctattgtaggatttgaggccctgttgcgctggtatcatccaaaacaaggcgtactgaatcctgaccagtttttaccgctggcggaaaaaacgggtcttatcgtcactatcggtagctgggtgatagacgaggcgtgtcgacagctccgcgagtggcacttacagggatacgacttatggtcagtggcggtaaatctgtccgccttacaatttgagcagcccgggcttgtggacaccattacgcggagcctggcccgacacagtatccgtcccgatttattgattctggaaatcaccgaaaccacggcgatgaacaagccagagcaaagcgtcgctatactcaccagattaacggaaatgggggttaaggcctctattgacgactttggcaccggttattccagccttctctatctgaaacgtcttccggcgtgcgaactaaaaattgatcgcgctttcgtacatgaactcagcgaggcaggcgacggcgcgaccattgttgcggctattgtcgcgctggcgaaagcgttaaatctgcaaattgtggcagaaggggtagagaatgaaacgcagcaacaatttttgacccagttaggatgccatacgcttcaggggttcctgcttggcaagccgcgtacggcagaggaaattgctcgcgatattcgggatcctgccaatatattcacaaggtcaatatataatatcaactcaaaataatctcaggcttcttccgcctgttgttcatttggcattaattgcctcacactgccatccgggcttagcatttttaatacattatcgactaatgcaggcgcctgcttataaagatcataacttgtgggattcattaaccagttttttactattccgctaaaactaccatgcagaataattaatatgacatccagatcaagactgcctgagatcagttttttatccatacatcgctgtaatacttcaagcagcgactgatgatggaaacccatcttctcccgaatggcctgttccgatatcataccattatggaattcacatttatgatataaaatctgcattaatgcctgctgacgaggcactgccgcaatatattgtaaggctgcaataaatttctctcgtagatcctgtaaaggattatcattccagcatcccgtaagcctatcctgaataagttcgcgtaaaggtggttgctgtaaccaaacctcattaaacaactgcgttttattctcaaagtgccagtagatggcgccccgcgtgacatcagcggcatcagcgatatcattcaacgtcgtgttggcaacgccgcgcaaagcgaactgcgcaatagcggtttcaatcaaatgttgccgcgttttaagcgcatccgccttcgttttcttcgccataattaagatatcctggaccataaaaacgataaatacgctgataaaatactcagcacaaaaaacaactttatcatgtcctttttagtcagacgagagacagctatttttatttcgcacaatatcgccaaatcaataataaaaacaaataaattaataaaacacattcatataaaatatatatttctatttatgttattcaacatcatgattttactaatcgggacattatgaaacgacagggaatagttctttttttttgcttttatgtgccgtgaaccccatcccaaaataagtattgcttacatcacaagctaataatttgtaggataccccactgctattctatttttcgcgcgttaacgccttaccgttatccggtgaataacgagctttcggttttttaaggaacagtaatgacgaaacatgccaggttttcactcctgccctcattcatcatattctctgctgcgctgctggccggttgtaatgaccagggagatacccaggctcatgccggcgagccgcaagtcaccgtccatgtggtcgaaacagcgccgctagccgtaacgaccgaacttcccggacgtacgtccgcatttcgcattgcggaggttcgcccccaggtgagcgggatcgtgcttaaaagaaacttcaccgaaggtagcgatgtagaggccgggcagtcgctctatcagatcgatcctgccacttatcaggctgattatgacagcgctaaaggcgaacttgctaaaagcgaagcggctgcggctatcgcgcacctgacggtcaaacgctatgttccactggtcggcacaaaatatatcagccaacaggaatatgatcaggcgattgccgacgcccgccaggccgatgccgccgttgtggcggcaaaagccgctgttgaaagcgcgcgtattaaccttgcgtataccaaagtcacctcacccatcagcgggcgtataggaaaatctaatgtgactgaaggcgcgctggtgactaatggtcagtcaactgaactggctaccgtgcaacaactcgatccgatttatgtcgacgtgacgcaatcaagcaacgactttatgcgactcaagcaatccgtcgaacaaggtaacctgcataaagacagcgccagtagcacggttcaactggtaatggaaaatggtcaggtctacccgattaaaggcacgctgcaattttccgacgttaccgtagatgaaagcaccggctctatcacgctcagggcggtgttccctaacccgcaacacagtctgcttcccggtatgtttgttcgcgcccgcattgatgaaggcgtccagcccaatgccatccttgtcccccagcagggcgtaacccgcacgccgcgcggcgacgcaatggtgatggtggttaacgataaaagccaggtcgaagcccgcaatgtcgtggcggcgcaggctattggcgataaatggctcatcagcgaagggttaaaaccgggcgataaggtcatcgtcagcggcttacaaaaagcgcgaccgggcgtccaggtgaaagccactaccgatgctcctgcagcgaaaacggcgcaataaggtaaccgtacatggcaaacttttttattagacgtcctattttcgcctgggttctggccattatcctgatgatggctggcgcactggcaataatgcaacttcccgttgcgcagtatccaaccattgcgccgccagcggtttctatttctgcaacctatcctggcgcggatgcgcagacggtacaggatacggttactcaggttatcgaacaaaatatgaacggtatcgataacctgatgtatatgtcctctaccagcaactctgctggtagcgtgaccatcaccctgaccttccagtccggaaccgatccggatatcgcgcaggttcaggtgcaaaataaattgcagctcgccacgcctttactgccgcaagaagtccagcagcaggggattagcgttgaaaaatccagcagcagctttttgatggtcgccgggttcgtctcagataatccgaacactacccaggacgacatctctgactatgtcgcctctaacattaaggattctatcagccgtctgaatggtgtgggcgacgttcagctatttggcgcacagtacgccatgcgtatctggctggatgcgaatctgctaaataaataccagctcacgccagttgacgtcatcaaccagttaaaagtacagaacgaccagattgcggcaggccaactgggcggcacgccagcattaccgggccagcagcttaacgcctcaatcatcgcccaaacgcgtctgaaagatccggaagagttcggcaaagttacgttgcgcgtcaataccgacggctctgtcgtccatctcaaagatgtcgcgcgtattgagcttggcggtgaaaactataacgttgtagcgcgcattaacggtaaaccggcctccggtctcggtattaaactggcgaccggcgctaacgcgctggataccgcaaccgcaatcaaagtgaaactggcggagctgcagcctttcttccctcagggaatgaaggtggtttatccttatgacacaacgcccttcgtaaaaatatctatccacgaagtggtaaaaacgctgtttgaagcgattattctggtgttcctggtaatgtatctgttcttacagaatatccgggcaaccctgattcctaccatcgctgttcctgtcgtgttgctaggcacttttgcggtactcgccgcctttggctattccatcaataccctgacgatgtttggtatggtactggcgatagggctgttggttgacgatgcgatagtggtcgtagaaaacgttgaacgtgtaatgatggaggataacctttctccccgagaggcgacggaaaaatccatgtcgcagattcagggagcgctggttggtatcgcgatggtactgtctgcggtatttatcccgatggccttttttggcggctcgaccggggcaatttatcgccagttctctattactattgtttcagcaatggcgctatccgttctggttgcgttgattctgacgccagcactgtgcgctacgctgcttaaacccgtatctgctgaacatcacgagaaaaaaagcggcttctttggctggttcaataccaggtttgaccacagcgttaaccactatactaacagcgtaagcggcatcgtgcgtaatacgggtcgctatctcattatctatctacttattgtagtcggaatggcggttctgtttttacgcctcccgacctccttcctgccggaagaagatcagggagtattcctgaccatgattcagctcccctctggcgctacgcaagaacgtacgcagaaagtgctggatcaagtcactcattactacctgaataatgaaaaagcgaacgtcgaaagcgtgtttaccgtaaacggctttagctttagcggtcagggacaaaactcagggatggcatttgtcagccttaaaccctgggaagagcgtaacggtgaagaaaatagcgtcgaagccgttatcgccagagcgacacgcgcctttagccagattcgcgacgggttggtgttccccttcaacatgccggcaattgtcgagttaggtaccgcaacaggtttcgacttcgaactgattgatcagggaggactcggtcacgatgcgttaacaaaagcgcgtaatcaactcctgggtatggtcgcgaagcatcctgatctattagtgcgcgtacgcccgaacgggctggaagacacgccacagttcaagctggatgtcgatcaagaaaaagcgcaggcgctcggcgtttcgctgtctgatatcaacgaaaccatctccgcggcgttgggcggctattacgttaacgactttatcgatcgcggacgagtgaaaaaagtatacgttcaggctgacgctcagttccgtatgctgccgggagatatcaacaatctttatgttcgcagcgctaatggcgagatggtgcccttctctacctttagctcagcacggtggatttatggttcgccacgcctggaacgctataacgggatgccgtcaatggaactgctcggcgaagcagcacccggacgaagcaccggtgaagccatgtcgttaatggaaaacctggcttcacagctaccaaacggtattggctatgactggacaggtatgtcgtatcaggaacggttgtcaggtaaccaggcgccggcgctgtacgcaatctcactcattgtcgttttcctctgccttgccgctctgtatgaaagctggtcaattccgttctcggtaatgctggtcgtaccgctcggcgtggttggcgctctgcttgcagcgtcattgcgcggtctgaacaatgacgtttacttccaggttggcttgttaaccactattggcctttctgctaaaaacgccatcctgattgtcgagttcgccaaagatctcatggaaaaagaaggacgtggattgattgaagcgacgctggaagcatcccgtatgcgtttacgtcctattctaatgacctcgctggcctttattctcggggtaatgccgttagttatcagtcgtggcgcaggtagtggtgcacagaacgcagtaggcacaggggttatggggggaatgttaaccgcaaccttattagctatcttcttcgtgccggtattcttcgttgttgtaaaacgccgatttaatcgccatcatgattaaccggtaaacagaggcgtcttcggacgcctttttaaacggtacgtctttatctccgctattccccctctccgcttacctctgcattctccatagtttttacaattcacatgaattgagatgattcctcatgtcggccattttttctgtggtggtaaaataactctcgttttcgcagcggttagagccagcattacgttgctgtacttcgcgaaacgctgattaatgaggtaacaccatgaaaagactaattccagttgcattgcttaccaccttattggcaggttgtgcacatgattctccctgcgtaccggtttatgacgatcaagggcggctggttcataccaatacatgtatgaaaggtacaacgcaggataactgggagacagcaggcgctattgctggcggcgctgcggcggtagcagggttgacgatgggtatcattgcgctttctaaatgatacatgcaggcgcggcaatgccgcgctttcagtaataatataaaggtcgtaaggatactcagcgacgtaatctgttcagcctgtcccccgaaagttaacacgataaaacgctctcttttcttactcgcccatcccgatggtatttattctattccttgtccgatgcagacaaaattatagcttgatagcatcgtaagccgcattacaaacaggctttatacagtaagacttagagcgtgatcattaggcgtaattattacagacagtctggatataaaccggaacatacacgtaatacatgaggattttgagcactgtccctaggccaaactggcaaataaaatagcctaatgggccagatttttagtcctcagcgaatatctctattgcttattagaggcgtaagtaaaagccgtttgtacatctacttcagcacggttcacattcgatggttcaggcggatatatggtgggaaatcacgttgactaaaacggtttttatccactctacgaagatgtttaaaacgcgtcggcgtcattatccgataactttttccatagagagataaatgcaaaaaggcccagtctttcgattgggccctttgctttatttgatgtctggcagtttatggcgggcgtcctgcccgccaccctacgggccgttgctgcgcaacgttcaaatccgctcccggcggatttgtcctcctcaggagactactcaccgacaaacaacagataaaacaaaaggcccagtctttcgactgagccttttgttttatttgatgtctggcagttccctactctcgcatggggagaccccacactaccatcggcgctacggcgtttcacttctgagttcggcatggggtcaggtgggaccaccgcgctactgccgccagacaaattctttttcaaataccgaactttaaccgtattaagtggtgctgatacccagagtcgaactggggacctcacccttaccaagggtgcgctctaccaactgagccatatcagcacactaaatttgatgcctggcagttccctactctcgcatggggagaccccacactaccatcggcgctacggcgtttcacttctgagttcggcatggggtcaggtgggaccaccgcgctagtgccgccaggcaaattctgttatcagaccgtttttacgttctgatgtaatctgaatcagtgctgaaaatcttctcttaaccgccaaaacatcttcggcgttgtaaggttaagcctcacggttcattagtaccggttagctcaacgcatcgctgcgcttacacacccggcctatcaacgtcgtcgtcttcaacgttccttcaggagactctaagtctcagggagaactcatctcggggcaagtttcgtgcttagatgctttcagcacttatctcttccgcatttagctaccgggcagtgccattggcatgacaacccgaacaccagtgatgcgtccactccggtcctctcgtactaggagcagcccccctcagttctccagcgcccacggcagatagggaccgaactgtctcacgacgttctaaacccagctcgcgtaccactttaaatggcgaacagccatacccttgggacctacttcagccccaggatgtgatgagccgacatcgaggtgccaaacaccgccgtcgatatgaactcttgggcggtatcagcctgttatccccggagtaccttttatccgttgagcgatggcccttccattcagaaccaccggatcactatgacctgctttcgcacctgctcgcgccgtcacgctcgcagtcaagctggcttatgccattgcactaacctcctgatgtccgaccaggattagccaaccttcgtgctcctccgttactctttaggaggagaccgccccagtcaaactacccaccagacactgtccgcaacccgggtaacgggtccacgttagaacatcaaacattaaagggtggtatttcaaggtcggctccatgcagactggcgtccacacttcaaagcctcccacctatcctacacatcaaggctcaatgttcagtgtcaagctatagtaaaggttcacggggtctttccgtcttgccgcgggtacactgcatcttcacagcgagttcaatttcactgagtctcgggtggagacagcctggccatcattacgccattcgtgcaggtcggaacttacccgacaaggaatttcgctaccttaggaccgttatagttacggccgccgtttaccggggcttcgatcaggagcttcgcttgcgctgaccccatcaattaaccttccggcaccgggcaggcgtcacaccgtatacgtccactttcgtgtttgcacagtgctgtgtttttaataaacagttgcagccagctggtatcttcgactgacttcagctccatgagtaaatcacttcacctacgtgtcagcgtgccttctcccgaagttacggcaccattttgcctagttccttcacccgagttctctcaagcgccttggtattctctacctgaccacctgtgtcggtttggggtacgatttgatgttacctgatgcttagaggcttttcctggaagcagggcatttgttgcttcagcaccgtagtgcctcgtcgtcacgcctcagtgttaaagtgaaccggatttacctggaacacacacctacacgcttaaaccgggacaaccgtcgcccggccaacatagccttctccgtccccccttcgcagtaacaccaagtacgggaatattaacccgtttcccatcgactacgcctttcggcctcgccttaggggtcgactcaccctgccccgattaacgttggacaggaacccttggtcttccggcgagcgggcttttcacccgctttatcgttacttatgtcagcattcgcacttctgatacctccagcatgcctcacgacacaccttcacaggcttacagaacgctcccctacccaacgaacgtatccctaagccaactcgactttaatgaacgctttgacgtcgcttcgctccgtcaatcgtcaactccgtaaagttgtcttgggtgatacgttcgctgccgcagcttcggtgcatggtttagccccgttacatcttccgcgcaggccgactcgaccagtgagctattacgctttctttaaatgatggctgcttctaagccaacatcctggctgtctgggccttcccacatcgtttcccacttaaccatgactttgggaccttagctggcggtctgggttgtttccctcttcacgacggacgttagcacccgccgtgtgtctcccgtgataacattctccggtattcgcagtttgcatcgggttggtaagccgggatggccccctagccgaaacagtgctctacccccggagatgaattcacgaggcgctacctaaatagctttcggggagaaccagctatctcccggtttgattggcctttcacccccagccacaggtcatccgctaatttttcaacattagtcggttcggtcctccagttagtgttacccaaccttcaacctgcccatggctagatcaccgggtttcgggtctataccctgcaacttaacgcccaattaagactcggtttccctccggctcccctatacggttaaccttgctacagaatataagtcgctgacccattatacaaaaggtacgcagtcacaccccgaagggtgctcccactgcttgtacgtacacggtttcaggttctttttcactcccctcgccggggttcttttcgcctttccctcacggtactggttcactatcggtcagtcaggagtatttagccttggaggatggtccccccatattcagacaggataccacgtgtcccgccctactcatcgagctcacagcacatgcgcttttgtgtacggggctgtcaccctgtatcgcgcgcctttccagacgcttccactaacacacatgctgattcaggctctgggctcctccccgttcgctcgccgctactgggggaatctcggttgatttcttttcctcggggtacttagatgtttcagttcccccggttcgcctcattaacctatggattcagttaatgatagtgtgacgaatcacactgggtttccccattcgggtatcgccggttataacggttcatatcaccttaccggcgcttatcgcagattagcacgcccttcatcgcctctgactgccagggcatccaccgtgtacgcttagtcgcttaacctcacaacccgaagatgtttctttcgattcatcgtcgtgttgcgaaaatttgagagactcacgaacaactttcgttgttctgtgtttcaattttcagcttgatccagatttttaaagagcaaatatctcaaacgtgactcgtaagtcagttttgagatattaaggcaggtgactttcactcacaaaccagcaagtggcgtcccctaggggattcgaacccctgttaccgccgtgaaagggcggtgtcctgggcctctagacgaaggggacgtatcagtctgcttcgcaagacgccttgctatttacttttcatcagacaatctgtgtgagcactgcaaagaacagttctttaaggtaaggaggtgatccaaccgcaggttcccctacggttaccttgttacgacttcaccccagtcatgaatcacaaagtggtaagcgccctcccgaaggttaagctacctacttcttttgcaacccactcccatggtgtgacgggcggtgtgtacaaggcccgggaacgtattcaccgtggcattctgatccacgattactagcgattccgacttcatggagtcgagttgcagactccaatccggactacgacgcactttatgaggtccgcttgctctcgcgaggtcgcttctctttgtatgcgccattgtagcacgtgtgtagccctggtcgtaagggccatgatgacttgacgtcatccccaccttcctccagtttatcactggcagtctcctttgagttcccgacctaatcgctggcaacaaaggataagggttgcgctcgttgcgggacttaacccaacatttcacaacacgagctgacgacagccatgcagcacctgtctcacagttcccgaaggcacaaatccatctctggattcttctgtggatgtcaagaccaggtaaggttcttcgcgttgcatcgaattaaaccacatgctccaccgcttgtgcgggcccccgtcaattcatttgagttttaaccttgcggccgtactccccaggcggtctacttaacgcgttagctccggaagccacgcctcaagggcacaacctccaagtagacatcgtttacggcgtggactaccagggtatctaatcctgtttgctccccacgctttcgcacctgagcgtcagtctttgtccagggggccgccttcgccaccggtattcctccagatctctacgcatttcaccgctacacctggaattctacccccctctacaagactcaagcctgccagtttcgaatgcagttcccaggttgagcccggggatttcacatccgacttgacagaccgcctgcgtgcgctttacgcccagtaattccgattaacgcttgcaccctccgtattaccgcggctgctggcacggagttagccggtgcttcttctgcgggtaacgtcaattgctgcggttattaaccacaacaccttcctccccgctgaaagtactttacaacccgaaggccttcttcatacacgcggcatggctgcatcaggcttgcgcccattgtgcaatattccccactgctgcctcccgtaggagtctggaccgtgtctcagttccagtgtggctggtcatcctctcagaccagctagggatcgtcgccttggtgagccgttacctcaccaacaagctaatcccatctgggcacatctgatggcaagaggcccgaaggtccccctctttggtcttgcgacgttatgcggtattagccaccgtttccagtagttatccccctccatcaggcagtttcccagacattactcacccgtccgccactcgtcagcgaagcagcaagctgcttcctgttaccgttcgacttgcatgtgttaggcctgccgccagcgttcaatctgagccatgatcaaactcttcaatttaaaagtttgatgctcaatgaattaaacttcgtaatgaattacgtgttcactcttgagacttggtattcatttttcgtcctaggacgttaagaatccgtatcttcgagtgcccacacagattgtctgataaattgttaaagagcaggtgcgacgcggcttgcagctcaccgtcgcgaggtggcgtatattacgctttcctctttcagagtcaaccctgaatttcaggatttttctcttcaaccgaccggctgtttgtgtgaagtgattcacatccgccgtgtcgatggaggcgcattatagggatcccatttttttgcacaagcgttttttggatctttttttctgtttgttgatttttcatccctttcgctccattcctgcgcaaagtggcgattttttgatgctatctccccttgcacaacgccgttaaagcaaccaaagtcttcatgactattcatttatgatgaggtagacatgtctgacacattacgtccttataagaatctttttcctggtatcggtcagcgcgtgatgatcgataccagcagcgtggttattggcgatgtccgtctggcggatgatgtcgggatctggccgcttgtggtgattcgcggcgatgtgaattacgttgcgataggggctcgtacgaacattcaggatggcagcgttcttcacgtaacccacaagtcttcatccaatccacacggcaacccattaatcattggcgaagatgttaccgttggccataaagttatgctgcacggctgtaccatcggtaaccgcgtactggtcggtatgggctccattgtgctggatggcgcgataatagaagatgacgtaatgattggcgcgggaagcctggtgccgcagcacaaacggctggaaagcggctatttatatcttggcagtccggtaaaacagatccgccccttgagcgatgctgagagatcgggcctgcagtactccgccaataactatgtaaagtggaaagacgactatctttctcaggataaccatatccaaccgtgatcatcttcctgctgggccaggattaatgcttccgcctcttcttccaggtcccagcgatactcacgaaaaatggccagccattgctccgctgtttctccaccaaagcgatacgccagtacatctttttttattgcacacgtgagttgcatcccattaaccagggcgggaaagatgatagcactggcggcagtatcccattcttcgcggtcaggaaattgtatggcctggttcacgctaataattcctgctgtagctgctcaatcactggctcgacctgcggtaatacaccgtgccaaagcaaaacggcatgtgcagcctgccccaccagcattcccagcccatctgcgtagcgttttgcgccctgttgtacacaccaggagagaaatggcgtattccctttttgatagaacatgtcatagcaacagagggaagggtgaataagtgacgctggtatcgccgggatttcgccccgtatgccgctggaggtcgcattaataattaggtcaaactcacaaccatccagcttgtccatatccgtggcatgaacgctgccggtatgagcaaagattttcgccaacgcttcggcacgtgaagctgtacggttggtgatagtgaccgcgcaatccaaagaaagcagaggtaacagcacgccccgggatgcgccgcccgcgccaatcagcaaaatacgcaatcctgggcggataaaatttaaacgttcgagatcgcctaataaaccgataccgtcagtattgtcgccaagcaaacgaccatcttccagccgttttaatgtattgacggctcccgccagcgatgctcgttccgttaactcatccgaacgcgcaaacgcctcctctttaaaaggtactgtgatgtttgcgccttttccccctgccgcgaaaaaggcatcaagcgtattaatgaaattattaataggggccagcacgcgaccataggggtgaacaatatctagctgctgagcaaattgctgatgaataaatggcgatttgctgtgcgcaatcggatttccaaaaacagcataggtttccatcatattacccctgtcgaaacagttcgcccgtcagagcatcgcgaatttctgaaggatttaaacgcccacccgttgcgccttcaaccaccggaaaatcatcaccaaattgcgcacgcacctcttcaacggtacggcatggcggtaatccgctcagattggcgctggtggaaaccagcggtttgccatacgcattgcatagcgcgaccaccagcgggtggttggtaacacgaacggccagggaatcaaaacgtcccgtgagccaccgcggcgttgtcgcgggcgcaggaaaaacaaacgttaccggcccgggccagcaatcaaataccgctttacgctgtgcggcggtaagtatgctgtcatcaatataaggttttaactgctcaaagctggcggcaatcaaaatgagtcccttatcgacgggccgttgttttaacgccagcaggcgcgtaacggctgtttcactatcgggatcgcagccgacgccgaaaacggcttctgttggataagcgatgacattttctttattcaggagatctaccgctgcggcgatagatcctattggcaggttattattcacttgtttattccaccggaaccggctttccacattgtttactggcgcaaaagcgcttcacgccctgcgcggttttcttttcgatgagtagcggataatggcactcggggcattcccctgcaaccggtgtgaagttaatgacaaactgacattccgggtagcgatcgcaggaatgaaagattttaccgtaacgagaacggcgctggaccaaatgtccttgctggcaggctggacaggcaatcgccgtttcatccggtttatcaataaccactgtatgttcacattgcggatactgactgcatccgatgaacatgccaaagcgcccctgacgcaacaccagcacggcgccacactcagggcacagttgcccctccagaattttaacgatatgtccgtccgcctgacttttcagcggacgaacgtaatcgcattccggatagcgagaacagccgagaaacggaccatgtttcccggaacgaattaccagttcggccccgcactgcgggcagggctcatttttacgcaccgaaaacagtgctgatttagccatattcactcatgcagcattaacacctatcaatgcagcataccttcatttacctcaaagagtaattcttccatttgctgataggcgttttcacagcccggaatgttgaataacaccatcaaaataacccatttcaagtcttccaggtcaaactctgcggtatccagcgccagcacacgctcaatcaccatttctcgtgtttcgaggtttagcacctgaatctgctcaaggaataacaggaacccccggcaactggcatcaagcctttcacactcttcaaccgtataaatgcgcattgaaagagggtcggaagcaagttgcatgggttccgcgaggccatcctgatagtcagcgagtttttccagccacagcagcgcattgtagatgtcttcgcgatcaaacccagcgtcggtgagatcacgctccagtctgtcctgatccacgcgcagctcggcttcgttatggatgtatgtttcaaacaaatacattagtacgtcgaacatggcttgccctccttaatcggacatagccgccgggtacagctgcgatccatcctgctaactccagttcgagtagctgagccactaccgctggcacaggttggccggcacgttcagcgacgacgtcaacaggtgttacctcatctcctacgttagccaggagctcaggaaatggcaatgccgcctcatcctgatttagtgaataaagtgaattttccgccgtagttggcaaccagtgtaagccgtattgcaaattttccagaatatcctccggcgtcgtcacaagcgtggccccttgtttaattaaccagtgcgtgccttcgcttcccggactaccgataggacctggtaatgcaaaaacgtcccgcccctgttcaagcgcgcagcgcgccgtcaccaacgaaccgctgcgcaacgccgcctcgattaccagcacgcctttgctcagtccgctgatgatacggtttctgcgaggaaaatgttgcggtagcggaggcgttgaaagcggaaattctgagaccactgcgccgccggtggcaatcaagttttcagccagcatggcatgtcggcgaggataaatctttgccaagccattccctaacaccgctacactttttccccccatactcaccgcggcgttgtgtgctacgccatcaattccccgggcaaggccgctggtgatcgtcaaaccgcttttcgcaaggctttcgcaaagcagacgtccccagcgttctccataccaggagtggctccggctccctacgacggcaagttggcaggtatgcagacaggcaggatcgccgtcaataaaaatagcgccgggataatcgtcaatagcacgcagttggggaggataaatctcactatccgcacacagaaaatggtgctgcggtagttcaagccagcgtaatgtctcatcaagcacacctgctggaagctgtaaaaaacgttcagcttgccgcgcggtaagaccagcctcctgaaggtgcgtgcgatttatctgaggctggcgaataagcgagttcgccatgttcaacatcgcctcgccataaaggtcgccgacgtacattaaacgtaaccaaatttcggtacgggccatcctttccctcccctgccacaagcagtctgaacaatctttgcgattggtcactgatgctgtcaatcaggtggggatttgtctagaatagaggtaataatcttttcaactcctgaacacaactctggataattatgtcagttttgcaagtgttacatattccggacgagcgccttcgcaaagtcgcaaagccggttgaagaagtgaatgcagaaattcagcgtatcgtcgatgatatgttcgaaacgatgtacgcggaagaaggtatcggtctggccgcaacgcaggtcgatatccaccagcggatcatcgtgattgacgtttcggaaaaccgcgacgagcgcctggtactcattaacccggaattgctggagaaaagtggcgaaacgggtatagaagaaggctgtctgtcgattccggaacagcgcgctttagtgccgcgcgccgagaaagtgaaaatccgcgcgctggatcgcgacggcaacccgtttgagcttgaagcggatggtttgctggcaatttgcattcagcatgagatggatcatctggtcggtaaactgtttatcgattatttgtcgccgctgaagcaacaacgtattcgtcagaaagtagaaaaactcgaccgcctgaacgcccgggcttaaaggacaagaaccaacgtgtcagattcactacgtattatttttgcgggtacacctgactttgcagcgcgtcatctcgacgcgctgttaacttctggacataacgttgtcggcgtatttacccaacccgatcgtccagcaggtcgcggcaaaaagttgatgcccagcccggtaaaagtgctggcggaagaaaaaggcctgcccgttttccagcccgtgtcgcttcgtcctcaggaaaaccagcatctggtggctgacttacatgccgacgtcatggttgtcgtagcatatggtctgattctcccaaaggcagtgctggatatgccccgtctcggatgtatcaacgttcacggttcgctgcttccacgctggcgcggcgcggcgcctattcagcgctcactctgggcaggcgatgcggaaaccggcgtcacaattatgcagatggatgtagggctggataccggcgacatgctgtataaacttgcgtgcccgattaccgcagaagataccagtggctcactgtataataagttggctgaacttggcccgcaggggttaattaccacactaaaacaactggcggacggcacagcgacgcctgaagcgcagaatgaagcgctggtcactcatgcggaaaagctcagtaaagaagaagcgcgtatcgactggtctctctccgcagcacagctggagcgttgcattcgcgcctttaatccgtggccaatgagctggctggaaatcgacggccagccggtaaaagtctggcaggcgtccgtcattgaggacgccacgcagtcgctgccgggaaccattctggccgcgacgaaacagggcattcaggttgcaacaggcaaggggatattaaatttgctttcgcttcagcctgccggcaaaaaagcgatgagcgcccaggatctgttaaattcacgccgggaatggtttattcctggtaaccgtcttgcctgacggtcacgtctttataagcccggtgttaccgggcatttttattttatacatatgaaaaaacaaaacaatttacgtagtctggcagcacaggccgttgaacaggtcgtcgagcagggacaatcattaagtaatgtgctcccgccgctgcaacaaaaagtcgccgataaagacaaagcgctacttcaggagctgtgctttggcgtactgcgcaccctttcacagctggaatggctgatcaataagctgatgtctcgtccaatgaccggcaagcagcgtacagtgcattacttaattatggtcggcttttatcagttgctgtacacccgcgttcctccccatgcggcgctggctgaaaccgttgaaggcgcggtctccatcaaacgtccgcagttgaaagggttaattaacggcgtcctgcgccagttccagcgccagcaggaaacgttgcttaatgagtttgcgaccagcgatgcgcgctttttacatccaggttggctggtaaagcgtttgcaaaatgcttaccccacacagtggcaacacattattgaagcgaataaccagcgtccaccgatgtggctacgtgtaaatcgtacacaccacacccgcgacggttggcttggcttacttgaagacgcaggcatgaagggatatccccatcccgattatcccgacgctgtacgtctggaaacgccagctccggtacatgctttacccggttttgctgagggttgggtaactgtccaggatgcctctgcgcagggatgtgcggtttttctcgctcctcagaacggtgagcacattttagacttgtgcgccgcgcccggcggtaaaaccacgcatattctcgaagtggcccccgaagcagacgtgttggcagttgatattgatgaacaacgactctcccgcgtttacgacaacctaaagcgtcttgggatgaaagcgacagttaaacaaggggatggacgttatccctcccaatggtgcggcgagcagcagtttgaccgtattctgctggatgcgccctgctccgcaaccggcgtcattcgccgtcatccagatatcaaatggctgcgtcgcgatcgcgatatcgcggaactggcgcaattacaggcggaaattcttgatgccgtctggccgcgcctgaagcccggcgggacgctggtttacgccacctgttccgtactgccggaagaaaaccgcgatcagatcaaaacctttttacaacgcactcccgatgccgcgctcagcgaaacgggaacacctgatcagccaggacaacagaatctgccgggcggcgaagaaggtgatgggttcttttacgctaagctaatcaagaagtgatgagataacgggccacgactgatgaaaattatcatactgggcgcagggcaagttggcggaacactggcggaaaacctggtcggcgaaaacaacgacatcacggtggttgataccaacggcgaacggttacgcagtttgcaagataagttcgatctacgcgtagttcaggggcatggttcgcatccccgcgtgttgcgcgaagcgggcgctgacgatgcggatatgctggtcgctgtcaccagttcagatgaaactaatatggttgcctgccaggtagcctattcactcttcaacactccaaaccgtatcgcccgcattcgctccccggactatgttcgcgatgcggataaactctttcattctgaagcggttccgattgatcatctgatcgcgccggagcagttggttatcgataatatttatcgcctgatcgagtatccgggagcattacaggttgtaaactttgccgaagggaaagtcagtctggcagtagttaaagcctactatggcggtccactaataggtaacgcgctctcgacaatgcgagagcatatgccgcatatcgatacccgcgttgccgcaattttccgccatgacagaccaatccgtcctcagggctcgactatcgtggaagcaggggatgaagtcttctttattgcggcttcacagcatatccgtgcagtaatgagcgaattacagcgtctggaaaaaccctacaagcgcatcatgctggtgggcggcggcaatatcggcgccgggctggcaaggcgtctggaaaaagactatagcgttaaattgatcgaacgcgatcaacaacgcgccgcagaattggctgagaaactgcaaaacacgatcgtcttttttggcgacgcttccgatcaggaattgctggcggaggagcatattgatcaggtcgatctctttatcgcggtcactaacgatgatgaagccaatatcatgtccgcgatgttggctaagcggatgggcgccaagaaagtgatggtgttgatccaacgtcgcgcttatgtcgatcttgtgcagggtagcgttatagatattgcgatttctccgcagcaggccaccatctctgcattactgagccatgtgcgtaaagcggatatcgtcggcgtttcctcactacgtcgcggggttgccgaagccatcgaagccgtcgcgcacggcgatgaaagcacttcccgcgtggttggccgcgtcattgacgaaattaaactgccgccaggcaccattattggcgcggtggttcgcggtaatgatgtcatgatcgctaatgacaatttgcgcattgaacaaggcgatcacgtcattatgtttttgaccgataaaaagtttattaccgacgtcgaacgtctgttccagccaagtcctttcttcctctaatttaaggggcgctcattcagcgccctttttaattccctttatttatcaaggtttaatttatttcgctaaacagaagccgtaaatggaaaatgccttagcatttgttaaacttataacgtcagctgcatagggagaataaaaatgagttttattaaagaatttcgcgaattcgcgatgcgcgggaatgttgtggatttggcagtgggtgtcattattggcgcggcattcggtaagattgtttcttcactggttgccgatatcattatgccgccgttgggattgttaatcggcgggatcgactttaaacaatttgcttttacgttacgcgaagcgcagggagatattccggcggtcgtcatgcattacggcgtgtttatccagaacgtatttgattttgtgattgtggcctttgctatctttgttgccattaagcttatcaacagactcaaccgtaaaaaagcagaagagccggcagctccgccagcgccttctaaagaggaagtgttattgggcgaaatccgcgatctgctgaaagaacaaaataaccgttcttaataagcagaaggccagtggtaaaaaagtgattcactttcttgccactggcctcccagttccctcgattaccgtgtttacctttacgcagataacttcctttgcctttcttatttttttcaacgcgttgcctgaaaaggggatcgtgcagtaatgcctcgatggcattgtcctttatctgccctttcttatgttgataacgactcataatgtctcccgattgtataaattaacggcgcgagtgtagccccgccggttcaataaatcaacatcccgatttcgctccactggccccctgttccagggcttccagaatggaacaatagacgctactgtgggccgttccgcaacaagcatcattaagcctttgtaacgaacgctgcatcgtttgcagttccgcaatcctggcttcaacctcctgcaatcgctcttgcacaatactttttgactcctgacaggtatggtgctcaggatcaattcggatcgataaaagctcgcggatcgagtcgagcgtgaaacccaactgccgcgcataacgaataaacttgagacgctgcagatcgttttcggtatacagacgaaacccgccttcagtacgtacctcatgatccatcatctgttgcttttcatagtagcgaatggtatcaggcgttacgtctgccagctttgccagctcaccaatgcgatacatacaagctccgttaattatcgttgattttatgcagcagtttttctgcatactcaccgtgtaaaaagtcggtactcaacccagcctgccgaagttttagttcaagcagcgagagctggcgactaacctgatggtatcgagggtcatcttcccggatactgttgaggatatcaagtaactgaatagcatctctgcgctgctccagttcagggggaagacagcccgcattcttgagtaagcgataacccgcacgaagttccgccggcacatgagaatcatcatccagaataagcggctcgccacggccaggcaaattatcaaactcgcctttacgctgtgcctcgataatatgacgctctgcccactggtcaagtaaccacatacgtcgctccagggattgaacgaaaagaatacaattattgtagatatgtggggttcaggagggtataaaaaaacccgccgaagcgggtttttttacgttactacagattactctgcagcagcttctgttttctctgaacgatcaaccagctcgatgtatgccatcggcgcgttgtcgcctgcacggaagccacacttcagaatgcgagtgtaaccaccggcgcggctcgcgaaacgcgggcccagctcgttaaacagttttgccacgatctcgttatcacgagtacgggcgaatgccagacgacgattagcaacgctatcagtcttggcaagagtaatcagcggctcaactacgcgacgcagctctttcgctttaggcagggtcgtcttgatgatttcatgacgaaccagtgaacctgccatgttgcggaacatagcctggcgatggctgctgttgcggttcagttgacgaccactcttacgatggcgcatgaccttatccttctcagtaaaaccttaacctgtgatccggttactcgtcagcgatgcttgccggtggccagttttccaggcgcatacccagagacagtccacgggaagccagcacgtctttaatctcggtaagagattttttacccaagttaggcgtcttaagaagctcaacctcggtacgctgtaccagatcaccgatatagtggatagcttctgccttgaggcagttagcagagcggacagtcaattccagatcgtcaacagggcgcagcaggatcggatcgaattctggtttctcttctttcacttccggttgacgtacatcacgtaaatcaacgaaagcttccagttgttcagccaggatggttgccgcacgacgaatcgcctcttcaggatcgattgtgccgttggtttccatttcgatgaccagcttgtccaggtcggtacgctgttctacacgcgctgcttcaacattgtaggcaatacgctctacagggctgtagcaggcgtcgaccagcagacggccgattgggcgctcatcttcttccgaatgaattcgggtagaagccggcacataaccacgaccgcgctgaactttgatacgcatactaatagacgcgttttcatcggtcaggtggcagatcacgtgctgcggcttgacgatttcgacatccccatcatgggtgatatcggctgcagtcacagggccaatgccagatttattcaaggtaagaataacttcatctttaccctgaactctcaccgccagccctttcaggttgagcaggatttccaggatgtcttcctgaacgccttctttggtgctgtactcatgtagtacaccatcaatctcaacctcggtcaccgcgcaacccggcatcgatgagagcagaatacggcgcagtgcgttacccagagtatggccgaagccacgctctaaaggctcaagggtcaccttggcgtgcgtcgaactcacttgctcgatatctaccaggcgcggttttagaaactctgtcacagaaccctgcattgtgtcctctctttggtactaagctttacttggagtaaagctcgacgatcaggtgttcgttaatgtccgcagacagatcagaacgctcaggcttacgcttgtacgtaccttccatcttgccagcatcaacttccagccaggttggcttttcacgctgctcagccagctccagagcggctttcacgcgagactgcttcttcgctttctcacgaatgctaacaacgtcattcggactaacctgataagaagcgatgttaacaacacgaccgtttaccataattgctttatggctaaccagctgacgtgcttctgcacgagtggcgccgaagcccatacggtatacaacgttgtccagacgaccttccagcagagccaacaggttttcaccggtgttgcctttcagacgtgctgcttctttgtagtagttacggaactgacgctccagcacaccgtaaatgcggcgaactttttgcttttcacgcaactgcacaccatagtcagacagacgcggcttacgcgcaccgtgctggccaggagcttgttcaattttacacttggtatcgatcgcgcgaacgccagacttaaggaataagtcggtgccctcacgacggctcagcttgagcttaggacccaaatatcttgccattttctttctccaactaacctggaaaacgaagcgttatacgcgacgttttttcggcggacgacaaccgttatgagggatcggagtcacatcagtaatattagtgatgcggaaaccagcggcgttcagagcacgaatagtagattcgcggcctggacccggacctttaaccataacttccagattcttgataccgtattctttcacggcgtcagcgcaacgctctgctgcaacctgagctgcaaacggagtggatttgcgagaaccacggaaaccggaaccaccggctgttgcccaacccagcgcattaccctgacgatcggtaatagtcacgatggtgttgttgaaagaagcatggatatgagccacgccgtcagagacttgttttcttacacgtttacgtgcgcgaactggtgcctttgccattattcaatcaccccgattatttcttgatcggtttgcgcggacccttacgggtacgagcgttggtcttggtacgctgaccgcgaaccgggagaccacgacgatgacgcaaaccgcgatagcaaccaagatccatcaggcgcttgatgctcatgctgatttcacggcgcagatcaccttcaacgacaaatttggcaacttcgtcacgcagcgtgtcgatttgttcttcagacagctcactgatcttaacattttcagcgatacccgctgcagccaggatggctttagaacgggtcttgccgacaccgtagatcgaagttaacgcgatcacggcgtgtttctgatcaggaatgttaatgcctgctatacgggccactatgcactcctactatttaatatgtacgtaccatgctgaaaagcccgttttcaggatactcaaatggaaacgtacagacatacaaaagattggctggctaatctagccagctcaacccaactttgcaagaaaaatatgcgaaaaaatcagccttggcgctgtttatgcttcggctcggcactgcaaatcacacggatgacaccatcacgcttaacgattttgcagttacggcataatttcttgacggaagcacgaactttcatttttactctccgtaacttctcaggcgaccaattaacggccgtagcctttcaggttcgccttcttcaatgcagactcatactgactggacatcatcagagtttgcacttgagccataaagtccataatcacgacaacaacgataagcagtgaggtcccaccgaagtagaacggcactttcattgcatcacgcatgaactccgggatcaggcagataaaggtaatatacagcgcaccaaccagggtcaggcgggtcattactttatcgatatacttcgccgtttgctctcccggacgaattcctggtacaaatgcaccggacttcttcaggttatctgctgtttcacgcgggttgaaaaccaacgccgtgtagaagaaacagaagaagatgattgcagacgcatagagtaacacataaagcggttgcccaggctgcaaatacagcgaaattgttgtcagccagttccaaccagtaccgcccccgaaccatgacgcgatggtcgccgggaacagaataatactggaagcgaagattgccgggattacccccgccatattcactttcagcggtaaatgtgtgctctgtgcagcatagacacgacgaccttgctgacgtttggcgtagtttaccacaatacggcgttgaccacgttcaacgaatactacaaagaacgtcactgcaaatactaatactgcaaccaacagcaacacgaggaagtgcaggtcgccttgacgcgcttgctcgatagtatgggcaatggctggcgggagtcccgcaacgataccagcgaagatgatgattgagataccgttaccgataccgcgctcagtaatctgttcgccgagccacatcaggaacatggttcctgtaaccagactgacaacagcggtgaaatagaatgcaaagcctggattcatcaccaggccctgcataccaggcatattcggcaaaccggtagcaataccgatcgactggaatatcgccagcaccagagtaccgtaacgggtgtactggctgatcttacgacgaccagactccccttctttcttaatttctgccagcgttggatgaaccaccgtcaacagctggataatgatcgacgccgaaatatacggcatgatccccagggcaaagatagaagcacggctgagagcaccaccagagaacatgttaaacatttcaatgatggtgcctcgctgttgctcaagcagtttggcaagtacagcggcatcaataccagggatcggaataaaagagccaatacggaacacaatcagcgcgccgataacaaacagcagtctgcgtttcagctcacctaagccacctttggcactttgaaaatctaatcccggttgtttagccatctgctacttattcctcgattttaccgccagcagcttcgatagcagcacgagcgcctttagtaacacgcaggccacgaacagttaccggagtagtgacttcgccagccaggatcactttcgcgaactcgatctggataccgataatgtttgccgctttcagcgtgttcaggtctacaacgccgccttctactttcgccaggtcagacagacgaacttcggctgtaatcgctgctttgcgagaagtgaagccgaatttcggcagacgacggtacagaggcatctgaccaccctcgaaaccgcgacgtacgccaccgccagaacgagacttctgacctttgtgaccacgaccaccggttttaccgaggccagaaccgataccacgacccaggcgtttacccgcctttttggagccttcggccggagacagagtatttaaacgcatctcttactcctcaactttaaccatgaaggaaaccgcgttgaccataccacgaacagcaggagtatcctcgcgctctacggtgtgaccaatacgacgcagacccaggccaagcagcgttgccttgtgtttcggcagacgaccgattgcactgcgggtttgagtaattttaatagtctttgccatggtttatttccccagaatttcttcaacggatttaccacgcttggcagcgaccatttctggagaattcatattttccaggccatcaatagttgcacgaaccacgttgatcgggttggtggaaccgtatgctttagccagaacgttatgaaccccagcaacttccagaacggcgcgcattgcaccaccggcgatgataccggtaccttcggaagctggctgcatgaatacgcgagaccccgtgtgaacacctttaaccgggtgctgcagggtgccgttgttcagcgcgacgttaatcatattgcgacgggctttttccatcgctttctggatcgctgctggaacttcacgcgctttaccgtaaccaaaacctacgcgaccgttaccatcgcctactacagtcagagctgtgaaggagaaaatacgaccacctttaacggttttagatacgcggtttaccgcgatcagcttttcctgcagttcgccagcttgtttttcgatgtgagccatcttacacctctaccttagaactgaaggccagcttcacgggcagcatctgccagtgcctggacacgaccatgatattggaacccggaacggtcaaaggacacatctttgatgcctttttccagagcgcgttcagcgacagctttacccacagctgcagccgcgtctttgttaccggtgtacttcagttgttcagcgatagctttttctacagtagaagcagctaccagaacttcagaaccgttcggtgcaattacctgtgcgtaaatatgacgcggggtacgatgtaccaccaggcgagttgcgcccagctctttgagcttgcggcgtgcgcgggtcgcacgacggatacgagcagatttcttatccatagtgttaccttacttcttcttagcctctttggtacgcacgacttcgtcggcgtaacgaacacccttgcctttgtaaggctcaggacgacggtaggcgcgcagatctgctgcaacctggccgatcacctgcttatcagcgcctttcagcacgatttcagtttgagtcggacattcagcagtgatacctgccggcagctgatggtcaaccgggtgagagaaacctaaagacaggtttactacattccctttaaccgctgcacgataacctacaccaaccagctgcagcttcttagtgaagccttcggtaacaccgataaccattgagttcagcagggcacgcgcggtaccagcctgtgcccaaccgtctgcgtaaccatcacgcggaccgaaggtcagtgcattatctgcatgtttaacttcaacagcatcgttgagagtacgagtcagctcgccgtttttacctttgatcgtaataacctgaccgttgattttgacatcaacgccggcaggaacaacgaccggtgctttagcaacacgagacattttttcctccgattaggctacgtagcagataatttcgccaccaagaccagcctggcgcgctgcacgatcagtcataacacctttagaggtagaaacaactgcgatacccagaccggccataactttcggcagctcatctttacgtttgtagatgcgcagacctgggcggctgacacgctgaatgctttctacaacagctttaccctggaaatacttaagagtcagttccagttccggcttggtgtcgccttcaactttaaaatcttcaataaaaccttcttccttcagcacgttggcaattgccactttcagcttggaggaaggcatggtgaccgcagctttgttcgcggcctgaccgttacggatacgggtcagcatatccgcgatcggatcttgcatgctcatctgtctttactcccgtgattcaattggtgacaattaccagctagcctttttcagacccggaatttcaccgcgcatagcggcttcacggaccttaatacggctcaacccgaacttccgcaggaaagcgtgcggacgaccagtttgacggcagcggttacgctgacgtgacgggctggaatcacgcggcagagtctgcagcttaagaaccgcattccaacgatcttcgtcggttgcgttcacatcagagatgatcgctttcagttcagcgcgtttcgcgaagtatttatcagctaaagctacgcgttttacttcgcgtgctttcattgattgcttagccatttagtaaccctaccttacttgcggaacgggaagtcaaaggcagccagcagagcacggccttcttcgtcagatttcgcagtagtggtaatggtaatatccaaaccacgaacgcggtcgactttatcgtagtcgatttctgggaagatgatctgctcacggacacccatgctgtagttaccacgaccgtcgaatgacttagcggacaagccacggaagtcacggatacgaggaacagcaatagtgatcaggcgctcaaagaactcccacatgcgttcgccacgcagagttactttacagccgatcggatagccctgacggattttgaagcctgcaacagatttgcgtgctttggtgatcaacggtttttgaccggagattgctgtcaggtctgctgctgcgttatccagcagtttcttgtcagcgatcgcttcaccaacacccatgttcagggtgatcttctcgacccgagggacttgcatgacagaattgtagttaaactcagtcatgagtttgttaactacttcgtctttgtagtaatcatgcagtttcgccatcgtactactccaaattacttgatagtttcgctgttagacttgaagaaacggacttttttgccgtcttcgaatctaaagcctacacggtcagccttgccggttgccgcattgaagattgcaacgttagaaacctgaattgcagcttctttttcaacgatgccgcccggttggttcagagccggaaccggcttctggtgtttcttaaccaggttgataccttcaacaatgaccttgccggaagacaggacattcttaactttaccgcgtttacctttatctttaccggttaacacgataacttcgtcatcacgacggattttcgctgccatgattcgctccttagagtacttctggtgccagagagataattttcatgaacttctcgttacgaagttcacgagttaccggcccaaaaatacgcgtaccgataggctgctcgctgttattgtttaaaataacgcatgcattaccatcgaagcgaatgacagaaccgtccgggcgacgaacacccttcttggtgcgcaccactaccgccttcagcacatcaccttttttgaccttaccacgcggaatcgcttctttgatggtgatcttaatgatgtcgcctacgcctgcgtagcgacggtgcgagccacccagaaccttgatacacattacgcgacgtgcaccggagttgtcggcgacgttcagcatagtctgttcttggatcattttagtgctccgctaatgtcaactactactgagacccgaaaatcaggtcgttaaaaaaaccccatatcgagggcgcggcattataacaccgcaaatcagatatgggtagaaaaaataaacggcccatcgctgagccgtttattcgttgagaatgcgtactgtattacagaaccgctttctctacaacgcgaaccagagtccaggatttggtcttggacagcggacggcattcgcggatttcaaccacgtcgccgataccgcattcgttgttctcgtcatgtacgtgcattttggtcgtacgcttgatgaatttaccgtagatcgggtgtttcacaaaacgttcgatagcaacaacaatggatttctccattttgtcgctaaccacgcgaccttgcagagtacggattttatcggtcattacgcacccgccttctcagtcagtaaagtcttaacgcgtgcgacatcacgacgcacttgcttcaacaggtgagactgttgcagctggccacttgcagcctgcatacgcaggttgaactgctcacgcagcaggttcagtagctcggtgttcagctcttcaacgctcttctcacgcagctcttttgctttcattacatcaccgtcttagttacaaaggtggttttaatcggcagtttcgctgctgccagcttgaatgcttcacgggccagctcttccggtacgccgtccatttcatacaggactttacccggctgaatcaaggcaacccaatactccacgttacctttacctttacccatacgcactgccagcggcttttcagtgatcggtttgtccgggaatacacggatccagatcttaccttgacgcttaactgcacgggtcatagcacgacgtgctgcttcgatctgacgggcagtcagacgaccacggccaacagctttcaggccgaagctgccgaagctaacatccgcgcctgcagccagaccacggttgcggcctttgtgcattttacggaattttgtacgctttggttgtaacatcagcgacgctccttatttacggcctttacgctgctgctttttcggttgagcagccggtttttccggttgttcaacagcagccataccacccaggatctcgcctttgaagatccacactttaacgccgattacaccataagtggtgtgcgcttcagaggtgttgtagtcgatgtcagcacgcagagtgtgcagcggtacgcgaccttcgcggtaccattcggtacgtgcgatttccgcgccgcccagacggccgctaacttcaactttgatacctttagcgcccagacgcatggcgttctgtacagcacgcttcatcgcacgacggaacataacgcgacgttccagctgagaagtgatgctgtcagcaaccagtttagcgtccagttcaggtttacgaacttcggcgatgttgatctgtgcaggaacgccagcgatatccgctacgaccttacgcagtttttctacgtcttcaccttttttaccgataacgatacccgggcgagcggtgtgaatagtcacacggatgctcttagccggacgctcgataacgatacgagatacagacgctttagccagttccttcgtcaggtactgacgtactttaaaatcgctgtccaggttgtcagcgaattctttggtgttcgcaaaccaggtagagttccatggttttacaatacccaggcgaataccattaggatgtactttctgacccattgctagtctccagagtctcagcgatcggacacaaccacagtgatgtggctggtgcgcttcaggatgcgatctgcacgaccttttgcacgcggcataatgcgcttcatgctcgggccttcgtctacgaaaattttcgtaactttcagatcgtcaatgtcagcgccatcgttgtgttcagcgttagcaatggcagattccagaactttcttgaccagtacagccgctttcttgttggtgtaggtcagaatatccagagcctgcgacactttcttaccgcgaatcaggtcagcaacaaggcgaaccttctgagcagaagaacgagcatggcgatgtttagcgatagtttccatctcttcctcctaccttatttcttcttcgcttttttatcagcagcgtggccgcgataagtacgagtcggtgcgaattcacccagtttgtgaccgaccatttcgtcggaaacaaataccggaacgtgctgacgaccattatggacagcgatggtcaaaccgatcatgttaggaaagatcgttgaacgacgggaccaagtgcgcaggggcttcttgtctccgctttccaccgctttctctaccttcttcagcaagtgcaggtcaataaaaggacctttcttgagagaacgtggcatggcttatcctctaaaattatttgctacggcgacgtacgatgaatttatcagtacgcttgttgctgcgggtcttcttacctttggtctgaacgccccacggagttaccgggtgcttaccaaagttacgaccttcaccaccaccatgtgggtggtctactgggttcatcgcagtaccgcgaacggtaggacgaacgccacgccagcgtgcagcacctgctttacccagaacgcgcagcatatgctcagcattgccaacttcgcccagggttgcacggcagtctgcttcgactttacgcatttcaccagaacgcagacgcagggtgacataagcgccatcgcgagcaacgatctgaacgtaagtaccagcggaacgtgccagctgaccgcctttacctggtttcatttctacgttatgaacggtagaaccaaccgggatattgcgcatcggcagggtgttgcctgctttgattgcagcatcaacgccagactgaatctggtcgccagctttcaggcctttcggggccaggatgtaacggcgttcgccgtctttgtacagaaccagcgcgatgttcgcggaacggttcggatcgtactcaagacgttcaacaactgccgggataccgtctttgttgcgtttgaagtcaacaatacgataagcctgtttgtgaccaccaccgatatgacgagtggtgatacggccattgttgttacgaccaccggatttgctgtttttttcaaccagcggagcaaaaggtttgcccttgtgcagctctgggttgaccactttaacgacgtggcgacgacccggagatgtcggtttacatttaacaactgccattgtattactcctccgacttactcagcgccgccgacgaagtccagattctggccttctttcagggtgacgtaagcttttttccagtcgctacgacgaccgatacgctgtccgtgacgtttaactttccctttaacgaccagggtgttaacgacttcgacttcgacttcaaacagtttctgcacagcagctttgatttctgctttggtcgcgtctttagcaactttgagaacgatggtgttggttttttccatcgcagtagacgctttttcagaaacgtgcggtgcgcgcagcaccttcagcagacgttcttcacgaatcatgccagcatctcctcaacttgcttaacagcatcagcagtcattacgactttgtcgaaggcgatcaggctaaccgggtcgataccagtcgcatcgcgtacgtcaaccttgtgcaggttacgtgcggccaggaacaggttctcgtccagctcaccggtgatgatcagcacatcttccagagccatgtctttcagtttctgtgccagcagcttagttttcggcgcttctacagaaaacttctcgacaacgatcagacgatcctgacgtaccagttcggacaggatgcttttcagcgcgccgcggtacatcttcttgttaactttttgactgtggtcctgcggacgagcagcgaaggtcacgccaccggaacgccagatcgggctcttgatagaacctgaacgcgcacggccagtgcctttctggcgccacggttttttaccggaaccagttacttcagcacgagtcttctgagcacgagtaccctgacgagcaccagctgcataagcaacaacaacctggtgaaccagcgcttcgttgaaatcacgaccgaaggtagtttcggaaacagtcagcgcgctctgcgcgtctttcaatactaattccattgctatccccttacgccttcacagctggtttaacgatcaggtcgcaaccggttgcacccggaacaccacccttaaccagcagcaggttgcgctcagcgtcaacgcgtactacgtcaaggctctgaacggttacgcgctcattacccatctgacctgccattttcttgcctttgaacactttgcccggagtctggttctgaccgatagaacccggaacgcggtgagacaaggagttaccgtgagtagcgtcctgggtacggaagttccagcgcttaacggtaccagcgaaacctttacctttagaggtaccggttacgtcaacttttttaacgtcagcaaacagttcaacgctgatgctctgacctacggtgtattcttcgccttcagccagacggaattcccacagaccacggccagcttctacgccagctttagcaaagtgacccgcttccggcttggtgacacggttagcttttttagcacccgtagtaacctgaacagcgcggtagccatcgttagccaggtctttaacctgagtaacacggtttgcttcaacttcgattacggttactgggatagagacgccatcttcagtgaagatgcgggtcatacccacttttttaccgactaaaccaatcattgtatcaacctctcaatcgctcgatgacctgattaacccaggctgatctgcacgtctacaccggcagccaggtccagacgcatcagagcatcaacggttttctcggttggctcaacgatgtcaaccagacgcttgtgagtgcgaatttcgtactgatcgcgcgcatctttgttaacgtgcggagagatcagaacggtaaagcgctctttgcgggtcggcagcgggatcggaccgcgaacctgcgcaccagtgcgcttggcagtctcgacgatttccgcggttgattgatcgatcagacgatgatcaaacgctttcaggcggatacggattctttggttctgcatgagaccagagctccaattattttataaacgaaaatgattactcctcacacccattacgattgatgggagagtgtaaccgttcttacgtagctccccgattgggagcattgttaaatagccaaatcggctattcgaggttcaaatcgaacctgccgtcaattacgacaagcccgcgcattatacgtaaatctcagcctgacgcaagtgtcggatagaaattaagcgctttattcttatgcgagcacgattccagatggtacgcatgggatggcgacgcgcatcttttctttggaaggcatcaggcaaacctggcaatacgtcgttgtcgctgtcgcataaatctataaaggtgagcgcaagccttgacgaggatttgcttatgtttgttgccctcccctttctcattttttatgcgtcgttctctttattacttggcatatacgacgcgcgtaccggtctgctgcctgaccggtttacttgtccattgctgtggggtggtctgctttatcaccagatttgcctgccggagcgtttaccggatgcgctttggggcgctatcgccggctatggcggattcgcgttaatttactggggctatcgcctgcgttatcagaaagaggggcttggatatggcgacgtcaagtacctcgctgccttaggggcgtggcattgttgggaaacactgccgttactggttttccttgccgctatgttggcctgtggcgggtttggcgtcgcgctactggtgagaggtaaatcggcattaataaacccgctaccttttgggccatggctggcggtggcgggtttcataacaggttggaaagttttctttccagacggttaatcggtaaccttaatttgtgattgcagataattttgcataccaagtttggcaatcaaatccaactcagtttccagccagtcgatgtggccttcctcgtcggcaagaatttcaatcatcatatcccggctgacataatcatgaacgctatcggcataggctattgcctcacgtagatcttttgcgccttccagttcgagccggagatccgatcgtagcatctcttcgacatcttcaccgatgcccagcttgcccagatcctgtaggttcggtatgccttccagaaataaaatacgctcaatatacttatcagcgtgtttcatctcatcaatggattcatggtactcaacatcattaagccgggtcagcccccagtttttgaacatacgggcatgaagaaaatactgattaattgcgacaagctcatttcccaatagtttattgagataatttatgattttaacatcacctttcattttatagtccctccgcttccactctctagagcgtagatggggctacagggatgtcaaaaaaaagagtgtgactcaggcgatctctttaaattccggcatttgcgttaactcatcctgcatcacttctcgcgcggcgcgaatacacttaccacattgatttcccacaggaataaatttacgcaactgttgaaatgactgtggatgaaattgtcgtacagcctggcggatttttttatcgcttataccattacacaaacaaacgtacatgatcgctcccgttcaatttccgcacaaagtgtaaatgagaatggttatgattacaatagcacaaagcgatttacgccacgggagaagcgttaaaaagggtgaataaatataacagcggctaaatagcaggcaacaaaaagggcgccgaagcgccctcttcaattcaaaactaattaacgagtaattagcccagaactttagcaacaacgcccgcgccaacggtacggccgccttcacggattgcgaaacgcagaccgtcgtccatcgcgatcgggtggatcagggtaacaaccattttgatgttgtcgcccggcattaccatctctacgccttccggcagttcgatggtaccagtcacgtcagtagtacggaagtagaactgcggacggtagcctttgaagaacggagtatgacggccgccttcatctttggacagaatgtacacttcagattcgaacttggtgtgcggcttgatggtgcccggcttagccagtacctgaccacgttcgatttcttcacgtttgataccacgcagcagaacacctacgttctcaccggcacggccttcgtccagcagtttgcggaacatttcaacgccagtacaggtagacttctgagtctctttgataccaacgatttcaacttcttcgcccactttgatgataccgcgctctacacgaccggtaacaacggtaccacgaccggagatggagaatacgtcttcgatcggcagcaggaacggcttgtcaatcgcacgctctggttccggaatataagaatccaggaagccagccagttcgatgattttcgcttcccactctgcgtcgccttccagcgctttcagagcagaaccacgaacgatcggagtgtcgtcgcccgggaagtcgtactgagacagcagttcgcgaacttccatctcaaccagttccagcagctcttcgtcatcaaccatgtcgcatttgttcaggaacacgatgatgtacggaacgcctacctgacgacccagcaggatgtgctcacgggtctgcggcatcgggccgtcagtcgcagcaacaaccaggatcgcgccgtccatctgagcagcaccggtgatcatgtttttaacatagtcagcgtgccccgggcagtctacgtgtgcgtagtggcgggtcggggtatcgtattcaacgtgagaagtgttgatggtgataccacgcgctttttcttccggcgcgttatcgatctggtcgaatgcgcgagcggcaccgccgtaggttttagccagtacggtagtaatggcagcggtcagcgttgttttaccatggtcaacgtggccgatagtaccgacgttaacgtgcggttttgtacgttcaaatttttctttagacacggctatattccttactatagcgctctccccttcaggagagagcacgggattttggtttttaaccctgcggcttatttaccacgggcttcgattacggcctgagcaacgttgttcggcgcatcatcatacttcaggaattccatagtgtacgatgcgcgacctttggtcagagaacgcagctgagttgcatatccgaacatttcagacagcggtacttcagcgtggatcttaacgcctgtaacttcagattcctgacctttgagcataccacgacggcggctaaggtcgccgataacgtcaccggtattctcttcaggtgtttctacttcaaccttcatgatcggctcaagcagaactggttttgctttcttaaagccttctttaaaggcgatagacgcagccagtttaaacgccagctcagaggagtcaacgtcatggtaagaaccgaagtgcagacgcacaccgagatcaactaccggataaccagccagcgggccagatttcagctgctcctggatgcctttatcaacggccgggatgtattcgccaggaattacaccacctttgatgtcgttgatgaactcgtaacctttcgggttagagcccggctccagcgggtacatgtcgataacaacatgaccatactgaccgcgaccaccagactgtttcgcgtgtttaccttcgatgtcggtaactttcgcgcgaatcgcttcgcggtaagcaacctgaggtttacccacgttagcttcaacgttgaattcacgcttcatacggtcaacgatgatatccaggtgaagttcacccataccagcgatgatggtctggttagattcttcatcagtccatacgcggaatgacgggtcttctttcgccagacggcccagagccagacccattttttcctggtcagctttggttttcggttctaccgcgatggagattaccggctcagggaattccatacgttccagaatgatcgggttttccggatcacacagggtgtcaccggtagtcacgtctttcaggccgatagcagccgcgatgtcgcccgcgcgaacttctttgatctcttcacgtttgttggcgtgcatctgaacgatacgaccgaaacgctcacgtgcggttttcacggagttcagtacggtatcaccagagttaaccacaccggagtacacacggaagaaggtcaggttacccacaaacgggtcggtagcgattttgaacgccagcgcagagaacggctcgtcgtcgcttgcgtgacgctcagccggagtatctttaccgtcgtccagaataccgttgatcgcaggtacgtctaccggggatggcaggtaatcaattaccgcatccagcatcgcctgaacacctttgttcttgaatgcagaaccacaggttaccaggatgatttcgttgttcagaacgcgctgacgcagagcttgtttgatctcttcttcagtcagttcttcaccacccaggtatttttccatcagctcttcagaagcttctgcggcggactcgatcaggttctggtgccattcgttagccaggtcctgcatgtcagccgggatatcttcgtattcgaaggtaacgccctggtcggcatcgttccagttgatggctttcattttcaccaggtcaacaacgccggtgaaaccttcttcagcaccaattgccagctgcagcggaaccgggttcgcgcccagacgggttttgatctgaccaacaactttcaggaagttcgcgcccatgcggtccattttgttaacgaacgcaatacgcggaactttgtatttgtttgcctgacgccatacggtttcagactgcggctgaacaccaccaactgcgcagtaaaccattaccgcaccatcgagaacacgcatggaacgttctacttcgatagtgaagtcaacgtgccccggggtgtcgatgatgttgatgcgatgcggttcatactgcttagccataccagaccagaatgcagtagtcgctgcggaggtgatagtaataccacgctcctgctcctgctccatccagtccatggtagctgcgccgtcatgaacttcaccgattttgtggtttacaccggtgtagaacagaatacgttcggtagtagtggttttaccggcgtcgatgtgcgcactgataccgatattacggtagcgtgcgatgggtgttgtacgagccatttgattcctcgttgatatctttaggcgttcagttaagttatccaaaacgggcgacttacctgaagcgcccgcctggtgactatgactccgaagggattaccaacggtagtgtgcgaacgccttgttggcttctgccatacggtgaacgtcttcacgtttcttaactgcagtacctttgttgtctgcagcatcagaaagttcgttcgccaggcgcagagccatggatttatcaccgcgtttacgagcagcttctacgatccaacgcattgccagagcattacgacggaccggacggacttcaactggtacctgataagtagaaccacctacacggcgggatttaacttctacagtcgggcgaacgttttcgagagcgacttcgaaagcttccagttcagatttaccagaacgctgagccagggtctccagcgcgctgtatacgattgattctgcagtagattttttaccatctaccatcaggatattgacaaatttagccagcagttctgatccgaacttcggatccggcagaattttacgctgaccaatgacgcgacgacgtggcatggaaatactccgttgttaattcaggattgtccaaaactctacgagtttagtttgacattaatttaaaacgtttggccttacttaacggagaaccattaagccttaggacgcttcacgccgtacttagaacgagcttgcttacggtctttaacgccggagcagtcaagcgcgccacgaacggtgtggtaacgaacacccgggaggtctttaacacgaccgccacggatcaggatcacggagtgctcctgcaggttgtgaccttcaccaccgatgtaggaagtcacttcaaaaccgttagtcagacgaacacggcaaactttacgcagtgcggagttcggttttttaggagtggtagtatatacacgagtacatacgccacgtttttgcgggcatgcttccagcgcaggcacgttgcttttcgcaactttgcgagcacgtggtttgcgtaccagctggttaactgttgccattaaatagctcctggttttagcttttgcttcgtaaacacgtaataaaacgccctcacacaatatgaggacgccgaattttagggcggtgtcgaaaaggtgtcaagaaatatacaacgatcccgccatcaccaggccatctggttggcatacttaaccgtgagtctgacaaactcagtatagtcaaccctgacgacactgtctgaaatttgaccacccaggccgcgggcgtcaatgtcttctttcaaggcatagaccgttatgggggcatcgcgcagactttcaaggaagcggttaccttcaatcgcgacggtaacgccatcctggagcagcaaaagcgcatcgccctcttttagcaggcgcagcaaagcgggaaaatcaacgctcgaagcgcaatgaggtaaggtatgcagcataaacgcctcagaatctcaggatgacatcatagttgccaagctcgcggcgtaacgccacgggttccagcggcgtggcgtctaccacaaaattaatgttctccagaccacgctcgcgcagcgatgccgcgcagatccagcattgatcaatatcgtacaaatcaaagagcttgaaagtagcaatatagtcacgcgccagtacagcgtctggtttttgtccgggtaataactgaaagacgccgtcgctgataaaaaagacgcccagcgcttccgttagcgctgacgtcgccagcagcgcatccagcccttcacgacctgaggcgctgccgtgcggcgcggtggaaaagacaaatgcaatacgtttcattaaaactgcaccacccgatcgcaggtgagagatgcctccgccagcgcgcccaggccgcttagcgtaaagcccggctgaagattggcggacggcaacgccaatctgccggcttcagtttcatcaataataccgcgacgaagcgccgccgcgacacagatgttcagcgctacgccatgctgcgtattcaatttctgccaggcgcgtaccagatcatattcatcgctcgccggcgaggtcaggagattggcgttatagacaccttcccgatagaaaaagacgctggctaactcatgcccctcattgagcagcgcgtgggcgaactgcaatgcgctgctggcctgctgggtgccatatgccggcccggtgaccataatggcataacgcattatttatcctgcccctgaaagtcgccgcttttgaactggcgaatatagaggtaaaccgtgtgttttgagatattcagacgatcggctacctggttaatggcgtctttaatatcgaaaatgcctttttcgtacaggttaaggacgatctgacgatttttcgcattgttagaaacattacgatcggcattcacttcttcgatcgtgaactccagcgtctgggtgactaaatcttcgactgaggaggcaaaattaaccgctgagccgacttccggcgtttccggcggaataaaggtattcataatctgtgaaaatggcacatcgagattcatgttgatgcacagtagaccaatgacgcgctgctcgcggttgcgaatggcaatcgtcaacgacttcatcaagacaccgcttttcgcgcgcgtgaaatagcatttcgacacgctactgtccgcccctgtcatgtcgtgcaacatacgcaacgccaggtcggtaatcggcgagccaattttacggcccgtatgttcgccattggcaatacgaatggctgaacattttagatcctgcaaagagtgcaatacgatttcacaatgggaacctataagcatcgctaacccgtccactaccgcttcgtaggatttcagaatatcgaagtcggtttgctcgaagggacgctgatccagcaaatcaagttcactggtttcgttggttaaaagcgacctggacatgaaaaaaaacactccttttcaggagcctgtcgttatgttttcagggcaggctcattatttacgcggatgattaaattaatacagtgagggttcatctttccagtactaatttgctcgtctatttcagactacgtgtgcgttggcggtcattcagcctacggtctcgcccttaacgaccagcgcaagcgccgttatccgcaaatcaaattatggtgagtaatatatccggcctgaataaaaaaaaccgccgctattacaagcggcggctctcagtttttattttttagcagcatctgcggctttagcgtcagccgcatcggcaggtttagcatccgctttcggcgctggtttgatatccagcagctctacgtcgaataccagggttgagtttgccgggatccccggaacgcccgttttaccgtaggccagctcaggtgggataaccagcttgatcttgccgcctttcttaatatttttcagaccttcagtccagccagggataacgccgtccagacggaaggagagcggttcgccgcgcgtgtaagagttatcaaactctttaccgtcgatcagagtacctttgtagttcaccacaacggtatcgctatctttcggcgcctcgcctgtgccttctttctctactttgtaaagcaggccggtagaggaggttttcacacctttctctttagcaaaagcgtcgcggaacgttttaccttttgcttcgttatcggcagcgtctttttccatcttcgcctgagcagcgctcttcacgcgtgcttcaaacgtctgcagcgtttgctcaatttcctgatcggacagtttgctcttatcggcaaaggcatcctgaacgccggcaatcaactgatctttatccagtttgatgcctaacttttcctgctctttaagcgaattttccatgtaacgacccagcgaggcgcccagcgcataagccgctttttgatcgtcgtttttaaatgctgctttgctatcagcggtagctgccggtttcgccgcatcagcagcaaaagtgatcggtgcgtgcatagcaacggccatcgtagttgccagcagcgtggctttaaacagtgatttcatccatatctccagggccggggcatctcgccccatgttaacttacgtaagaagcgtactataaatcgttgcagaacaaatcaacatacgaacacgccctattatcacttcttttcagactctttttgtttaaattagtttcgtagtgcgcgtaatggttgctgtgaaagccggtaaagttaagtagaatccgccgacggagacaacataaagaggtacatcatgcaggatatcacgatggaagctcgtctggctgaactggaaagccgtctggcgttccaggagattaccatagaagaactaaacctgacggtaaccgcacatgaaatggagatggcgaagctgcgcgatcatctgcgtttgctcacggaaaagttaaaagccagtcagccgtcaaatatcgcctctcaggcagaagaaacgccgccgccgcattattgagacgaaaaaaagcggggttaacccgctttttttgtgcccgatgatttatcgaaccaatgataataccctaaggatttcgagtcacagcaaggctgcaagcttgaaaattccccgggagcatagataactatatgaccggggtttgaaagcgtagccaacaccgcggtggcttgaaagacgacggggattaatggcagccgcagccgcctttaccaccaccgccgcagcagccttcgccgccgtgctcgtgaccatggtcatgaccatgaccgccacagcagccgtcttcaccgtgatcgtggtggtgatcgtgcgcgccatgaacatgaccgtgagccagttcttcttcagtcgcttcacgaatcgcaacaacttctacgttaaatttcagattctggcccgccagcatgtggttaccatcaaccacaacgtgatcgtcttccacttcggtaatctctaccggtaccgggccctggtcggtttccgccaggaaacgcatccctacctgcagttcatcaacgcccataaagacgtctttaggcacacgctgcaccagattttcgtcatactggccgtaagcgtcgttcgcgccaacagcgacatcaaatttgtcgccaacttcatggccttccagcgcggtttccagaccagagatcagggagccgtgaccgtgcaggtaatccagcggcgcactcaccggagactcatcaaccaacacaccgtcttctgtacgtacctgataggccaggctgaccaccaggtcttttgctactttcatgatatctcctgagcatgggaagaatagtggcgcagattgtagcggaattctgcagccgtgtaccccttagcttaaaaaaacctgcggcatatcgctagtccggatgaaaaatcccgatcacttgctcttctttgcgaacatgctcgcggacgtctttatccgcttcccgcatttgatgcccgcacttaacgcattcaacaatatcgacattattttcacgccacatcgccattgtatcctgcgcctgacaggccggacatttcgcgcctgcaataaaacgtttacggattgccattgttttacccctactcaaattcatcccagccatccaactggcgccgttcctgttgcatttcccgctgaaaaatctcctccagttcgcgtcgggcctctctggcgcgcgaaatctgtaccatgtcgctatgctccgggatcagttcccgcaacattcgcatatccagccgacgaaaatgcaactgcgcgcgttgcgcctgatgcggatgcatacctaacgacaccagagttttacgtcccagttccagcgcgctggaaaacgtttcacgggaaaactgcgtgacgccagcctgtaataactcatgggcctccacacgtccacgcgctcgcgcaagaatatgcagatgaggaaaatgctgctgacacagcgccaccagcttcatcgtgtcttccggttcattacacgtgatgactatcgactccgccgcttccgcgcccgcagaacgcagcagctcgacttgtgtagcgtcgccgtaatacactttataaccatatttgcgcatcagattaacggcgccgatatcgcgttccagcacggtgatacgcatcttattcgccatcaataagcgagcgatcacctgaccaaaacggccaaagccgacgacaatcacctggggcttatcatcctcaacccacggcttttcatcattctcttccgggccattaaggcggcgcgataaccacttatcaatccctttcatcagtagcggcgtggtcatcattgataatgtgacagtcaccaataataacgccatctgatcgccctgaaacaggcgctgagaagaggcggtagaaaagagcacaaaagcgaactcgcccccctgactcagcacgctggcaaactgcatccgttcagaacttcttattccatatagccgcgccagcagatacagcgtcaacatttttatgacgaccagaataacaacgctcgccgccacccacagtaaatgggtataaagtacgccgagatttagcgacataccgacggagataaagaacagcccaagcagtaaacctttaaagggatcgatagcattttccagctcatgccggtattcgctctctgccagtaaaacgccggcaatgaaggttcccagggccatcgacagtcccagcgcatccataaataaggcggcgctcaacaccagcaacagcgtcgcggcagtgaagacctcccgcacgccagacgcagcaataaaacgaaataccgggcgcagcaggtaacgaccgccaatcagcattaccgcgaaagccagtaccttcattgccactttaaaccagtcgaaatgctcgtcggccgatcccgccaataaaggcaccaacgccagtgcggggatcaccgctaaatcctgaaacagtaagacggaaaaccctaactgcccggactcgctacgattcatgcctttctcgcgcatcagttgtagcgccatcgccgtcgaagacatcgccaggccaatcccgccgacgaccgccgcctgccataagaaatcagcaagcatcaataatcccgccagcaccgccgcgcttaacagcacctgagcagcgccgacgccgaagatagagcgccgcagttgccaaagccgggacggattgagttcgagaccaatgataaacatcagaaacacgacgcccagttcggaaaagtgcaggatctcgtcaacgtcgctgataaatcccagcccccacggaccgatggcgattcccgccagcaaataccctagcaccgcgccgatgcccagcctggcggctaacggcaccgccgctaccgctgcgaagaggaacaacactcccgcggtcaataaatcagcaccttccatcaatagcctcccgcgctcacaggattcgccagccactcgccataggctttcgcatgactggccagcgtctgcggcgactggcggcgcgcccagtacacaataatgggcggcatccagtgcatccggcacatggccgcggtcagttcaaaagggcggagtacatcgctcattggatagcggtttagcgcgtcataccggtaagcgctctccggctcgccggtcgtaatcacgctacgccagtactttcccaccagttggtttccccctggtccgctggcgaacccccgactcaaaacgcgatcaagccattctttcagtaaagccggacagctataggtgtaaaggggatgctgaaaaacaatgacgtcgtgctcacgtaacagggcttgttcatagggcgtgtcgataaaaaaatcaggatagcgcgcataaagatcgtgcacggttacgttattgtgctgtatggccggtttaagcagtacccggttagcaaccgagtcctgagattccggatgggcatacaacagcaagactttcgctggctgagacatcaatccccctcccggttgttttgggtcgatacatgccattcttcaggccgcttctacgttgacagcgtttgttcaactcaggaacgtactctatgtccgccgctggggattaatgagagatattcttgtccctcaccaaaggcggcctgaatgattttgtgtatcgttgttgttttgagctaccattgcgctccagcgcggcggtacgcccgaatattacattatcataatgataaattaacatagtctgaacatactgcgccttatgattgttttctcctcgttacaaattcgtcgcggcgtgcgcgtcctactggacaatgcctcggctaccattaatccaggccagaaagtcggcctggtgggtaaaaacggctgcggtaaatctaccctgctggcattgctaaaaaatgaaatcagcgccgatgccgggagttttaccctgcccggaacctggcaattagcgtgggtgaatcaggaaacacctgcgttgcctcagccagcgattgagtatgtcattgacggcgaccgtgaataccggcagctggaggcgcagcttaacgacgccaacgaacgtaacgacggacatgctatcgcctccatacatggcaagctggacgccatcgacgcatggaccgttcgttcgcgcgccgccagcctgctacacggtctcggcttctctaacgatcagctggaacgtccggtcagcgacttttccggcggctggcggatgcgccttaacctggcccaggcgctgatttgccgttccgatttactgctgctcgacgaaccgaccaaccacctcgatctggatgccgtcatctggctggaaaaatggctgaagagctatccgggcaccctgattctgatctcccacgatcgcgactttcttgacccgatagtggataaaattatccatatcgaacaacagactctgttcgagtacaccggcaactacagcgcgtttgaagttcagcgcgccacgcgcctggcgcaacagcaggcgatgtatgagagtcagcaggagcgtgtggcgcatctgcaaagctacatcgaccgtttccgcgctaaagcgaccaaggccaagcaggcgcaaagccgtatcaagatgctggagcgtatggagctgattgcgccggctcatgtcgacaacccgttccatttcagcttccgcgcgccggaaagcctgccgaacccgctgctgaagatggaaaaagtcagcgcaggttatggcgatcgcatcattctggaatccatcaagctgaacctggtgcccggctcgcgtatcggcctgctgggtcgcaacggcgcggggaaatcgacgctgatcaagctgctggcgggcgaactggaaccgttgcacggtgaaatcggcctcgccaaaggcattaagctcggctacttcgcccagcaccaactggagttcctgcgcgccgatgaatccccgctgcaacatatggcgcgtctggcgccgcaggaactggagcagaagctgcgcgactatctcggcggcttcggtttccagggcgacaaagtaacggaagagacgcaacgtttctccggcggcgagaaagcgcgcctggtactggcgctgatcgtctggcagcgtccaaatctgctgttgctcgatgaaccgaccaaccacctggatctcgacatgcgtcaggcgctcaccgaagcgctgattgatttcgaaggcgcattggtcgtcgtgtcgcacgaccgccacctgattcgctccaccactgacgacctctatctggttcacgacaaaaaggtcgaaccgttcgacggagacctggaagattatcagcaatggctgagcgacgtgcagaaacaggaaaaccaggccgacaacgcgccgaaggaaaacaacgccaacagcgctcagtcacgcaaagatcagaagcgtcgcgaagccgagctacgcactctgacgcaaccgctgcgtaaagagattacccgtctggaaaaagagatggaaaagctcaacgcccaactggcgcaggcggaagagaagcttggcgacagcagcctgtatgacccaagccgtaaagcggagatgaccgagtgtctgcaactgcaggccagcgccaaatccgggctggaagcgtgtgaaatggcatggcttgaggcgcaggagcagcttgagcagatgatgcagaacgactaagagcctatcccattaggctattttattcgccattttagggccgggcagtgctcgaaatcctcacgtactatgtgtacgctccggtttctgcgcgctgtccggccccaaactggcttcaacaattacgcctacggggataggctctaacgcacggggcggacgatgaacctgtctatcaccgatgacattaccttccgcaagctcaccatcttaatgatgcttgtggagaagggcaacatcgcccgtaccgccgaggcgctaaacacgctggaagagaacgttcgtggtccgctgttcgtccataaaggcctcttaggtactcgccccggtataaagattaccgttgcggtcagcagcaccggaacagaagcctgcgttatgtgatttagcggcaaaggttgccgtgatttattttcgtcagcgcgtcgttcacgccaaataatgtaaacgtcacctcatcaacgccaagatttttcagacgcgcagtgtgttttttaatataagcctgcgccgtttcttcggattcaaacaagtaaataccgccagcttgctggtttttctcgctttctgtccagattttccagatgaagcccggctcctcattgatagactccgccagcccgaccagttgctgagtcatctcctcgccaaaagggccgctaaagttaaaatggatctgtaaaagtgtcttcgacatgccttctccttgagtcgcataactatcgtgttgccacactaccacgattaattcggctgatgcagaggttcacgcgatttctgtggggtattgcgcgcgccttgcatactgccctctctggtgaaatgaggcgcaattttatttcgccagacgaccaattgaacgtaaaatcacatattgactaatctgtgaaccttatgcgcggtatagtattgtttccaattatcaattgttctggtgctatggttgagatcacgtccacagaaatgaccccgcctgtcaataactcgcatgaatttattcccatgcgtggcattcgtaatcgccatttacaaactatgctgccgcgtttaatccgccgcaaagtgaagttcaacgcccactggcagcggctggagctaccggacggcgattttgtcgatctggcatggagcgaagatccgcaacaggcaaagtataaaccgcggctggtggtctttcacggtctggaaggcagcctgaacagcccctatgcccacgggctgattgaggcggcgcaaaagcgcggctggctaggcgtggtgatgcactttcgcggctgtagcggcgagcccaaccgtctgaatcgtatttaccactccggtgaaacggaggatggagcctggtttttacgctggctacagcgggagttcggcgccgttccgacagccgccgtgggctattcgctcggcggtaatatgctggcgtgcctgctggcgaaagaaggccgcgatattcccatcgaggcggcggtaattgtttctgcacctttcgttctcgaagcctgtagctaccacatggacaaagggttttcccgcgtctatcagcgttatttgcttaatctgttaaaagcgaatgcgtcacgcaagctggcggcgtaccccgggtcgctgccggtgaatctggcgcaactgaaatcaatgcgccgtattcgcgagtttgacgacctgatcaccgcgaaaattcacggctttgccgacgccatcgactactatcgtcagtgtagcgccatgccgttgcttaaccagattgctaaaccgacgctgattattcacgctaaagacgatccgtttatggatcatcatgtgatccctaaagcggaagatctgcccccgcaggtggagtatcagctgactgagcatggcggacacgtaggatttatcggcggtacgccgttgcgccctgaaatgtggctggaacgccgaattcctgactggctgacaacgtacctggaggcgtcatcatgatcattccctggcaggggctcgcccccgacacgctggacaacctgatcgaaagctttgtgttgcgcgaaggcaccgattatggtgaacatgaacgttcgcttgaacaaaaagtcgctgacgtaaaacgccaactgcaatccggcgaggccgtgctggtatggtctgaattacatgaaacggtcaatattatgccgaaaaagcagtttcgcgaataaaacgcctttgccgacaatacattattactaaagctcaatcatggagttgccatgtcagccaaacatccggtgatagcagtaacagggtcaagcggcgcggggaccaccaccaccagcctcgcgtttcgtaaaattttcgcgcagttaaatctgcacgccgccgaggtggaaggcgacagttttcatcgttacacccgcccggaaatggatatggcgatccgcaaagcgcgtgacgccgggcggcatatcagctatttcgggcctgaagccaatgacttcagcctactggaacatacctttattgagtacgggcagacgggtaaaggccagtcgcgtaaatatctgcatacctatgatgaagccgtaccgtggaatcaggttcccggcacgtttacgccctggcagccgctacccgaaccgaccgatgtgctgttttatgaaggactgcacggcggcgtcgtcaccccgcaacatgatgtcgcgcgtcatgttgatctgttggttggcgtggtgcctatcgtcaacctcgagtggattcagaaactgattcgcgacaccagcgagcgcggacactcccgtgaagcggtgatggattccgtggtgcgttccatggacgactacatcaattacattacgccgcaattctcgcgtacccatatcaacttccagcgcgtaccgaccgtcgacacgtccaatccgttcgccgcaaagggtattccctcgctggatgagagttttgtggtgatccatttccgcaatctggaagggatcgattttccctggctcctggcgatgctccagggctcgttcatttctcacattaatacattagtggtgccgggcggcaaaatggggctggcgatggagctgattatgttgccgctggtgcagcgattaatggaaggcaaaaaaatcgaataaccgcggtgaaatgcccgatggcgctacgcttatcgggcctacgagataaaaacgggtaggccggataaagccacgccgccatccggcatcacatgttacgccgcaatcacttcatacgaatgggtaatattgaccgctttttccagcattagcgccaccgagcaatatttttccgcggagagatcgacagcgcgcgcgacggcagcctctttcagatcgctgccggtaacgataaaatgcagattaatgtgcgtaaacaggcgcggcgcgtcttcccggcgctcggatgtcagcttcacttcgcagttggtgacattctgacggcccttttgcaggattgataccacatcaatagcgctacatccgccagccgccattaataccatctccatcggactcggcgctttgtcaccggagttgccatccattaaaatctggtggccggaggaggactctccgaggaacgtgagcccttcaacccactttacacgcgcttgcatatttcgtaactccaatgtttcaattttcctgaaagattacgcgcatacaacaaaagtcgcaatggaaggcgacctgggtcatgctgaagcgagacaccaggagacacacggcgaaagctatgctaaaacagacaagatgctacagtaatacattgacgtactgcatgtatgcagaggacatcacattacaggctacaatctattttcgtagcccccttcccaggtagcgggaagtatatttttgcaaccccagagacagtgccgttttctggctctggagacagcttataacagaggataaccgcgcatggtgcttggcaaaccgcaaacagacccgactcttgaatggttcttgtctcattgccacattcataagtacccgtcaaagagcacgctgattcaccagggtgaaaaagcagaaacgctgtactacatcgttaaaggctccgtggcagtgctgatcaaagatgaagaagggaaagaaatgatcctttcttatctgaatcagggtgattttattggtgaactgggcctgtttgaagaaggccaggaacgcagcgcctgggtacgtgcgaaaaccgcatgtgaggtcgctgaaatttcctacaaaaaatttcgccaattaatccaggtcaacccggatattctgatgcgcctctcttcccagatggctcgtcgcttacaagtcacctctgaaaaagtaggtaacctcgccttccttgacgtcaccgggcgtatcgctcagacgctgctgaatctggcgaaacagcccgatgccatgacgcacccggatgggatgcagatcaaaatcactcgtcaggaaatcggccagatcgtcggctgctcccgcgaaaccgttggtcgtattttgaaaatgctggaagatcaaaacctgatctccgcgcatggcaagaccatcgtcgtctacggcacccgttaattccgtcagaatggcgcgttttatcatgcgccatttttgtttgcatcgatgtggcgaagactgatttatcacccagagattaattacgcactacggcaaacgctggtgctgtgcctgcctgtggctgttggtttattaataggccagctacacctgggcttgcttttctctctcgttcccgcctgctgcaacattgcaggtctggataccccgcacaaacgcttttttaaacgcctgatcatcggcgcgtcgctgttcgccggatgcagtctggtaacgcaacttctgctggcggaatccatccccctgccgttgatcctgaccggcctcacgctggtgcttggcgtgacggcggaaattagcccgcttcacgcgcggctactgccagcatcgctgattgccgccatctttaccctgagccttgcgggatacatgcccgtctgggagccgctgctcatttatgcgctgggcacgctatggtacggcgtgtttaactggttttggttctggctatggcgcgaacagccgctgcgcgagtcattgagtttgttataccgtgaactggccgattattgcgaagcgaaatacagcctgctcacccaacatatcgatccggaaaaagcgctgcctcccctgctgatacgccagcaaaaagcggtcgatctcattacccagtgttaccaacagatgcatatgctttcggcgcacaacaataatgattacaagcgtctactacgggcttttcaggaagcgatggatttgcaggagcacatctccgtcagcttgcatcagccggaagaggtacagaaactggtagaacgcagccatgcggaagaggtgattcgctggaatgcgcaaacggtcgccgcccgtctgcgcgtgctggcggatgacattctttatcatcgtctgccgacgcgcttctccatggaaaaacagattggcgctctggagaagatcgccaatcagcatcctgaaaatccggtaggccagttctgctattggcacttcagtcgaatcgcccgtgtgctgcgtactcagcgaccgctgtacgcccgcgacctgatggccgataaacagcgtcgtttgccgctacttccggcgctgaaaaattatatgtctcttaaatcgccggcgctacgcaacgccggacgcatcagcgtgatgatgagcatcgccagtctgatgggcagtgcgttgcacctgcctaaaccgtactggatactcatgacggtgctgtttgtcacccaaaacggctatggcgcgacgcgcgtacgtattctgcaccgttcggtcggaacgctggtcggcctggtgattgccggcgtcacgctgcacttacatattcccgaaagcattacgctggcggtcatgctggtactaacgctggcaagttatctgattattcgtaaaaactacggctgggcgacggtcggctttacggtgacggcggtatacaccatccagttactgacgttaaacggagagcagtttattgtgccgaggctgatcgatacgctgattggctgtttaattgcctttggcggcatggtctggctgtggccgcaatggcaaagcgggctattacgtaaaaacgcccatgatgcgctggaagccgatcaagaagctatccgactgatcctcagtaacgatccgcaggccaccccgctcgcttatcaaagaatgcgggtcaaccaggcgcataacacgttattcaactcgttaaatcaggcaatgcaggaacccggattcaatacccactatctgtcggatatgaaactatgggtcacgcacagccagtttattgtcgagcatatcaacgctatgacgacgctggcgcgggaacacaccatgctgacgccggatctggcgcagcgctatctggaatcttgcgagattgctattcagcgctgccagcagcgcctggagtacgacaggccaggcggctccggcgatgtcaatattctggagtcgccggacatgccgtcacatggcttattgagcactctggaacaacatttacagcgcatcatcggccatctgaacaccatgcacaccatttcgtcgatggcctggcgtcagcgtccgcatcacggtatctggctgagtaagcggctacgggatacaaaaggttaagaccgaccgccggatgcgctacgcttatccggcaatccgccatcaggccaccaccttccctaccgcctgcgcaaagcgctgcattccttcatggatatccgcctcttccaccaccagcgacggggcaaaacgcatcacgtcggctccggcattgagcaccatcacgccggcctccgcgcctgcgtacagaaaatcgcgcgcccgacctttgtacttcggcttcagttccgcgccaatcagcagccccatgccgcgaatatcgctgaaaatgtcaaattgctcgtcaatcgcctgcaaatgttgcacaaactgttgccgcttagtgtgaatgccttgtagtacctctggcgtattaataatatcgaatgccgcgccagccaccgcacaggccagcggattgccgccataggttgaaccatgcgaacctacatggaaggccgaggctatttcctgcgtggtcagcatggcgctcaccggaaaaccgccgcctaacgctttggcgctggtgaggatatccggcgtgacgccgtagtgcatataggcaaacaggtctccggtgcgccccatcccacactgcacttcatcaaacaccagcaacgcctgatgctcgtcacacaggtcgcgtaaccctttgaggaattccggtgtagccgcctgcacgccgccttcaccctgaatcggctcgaccaccaccgcgcaggtgtggtcatccattaccgctttcaccgcatgaagatcgttgaggggaacgtgaataatatcggcgggtttcggcccaaagccgtcggaatatttcggctgcccgcctacagagacggtaaacaaggaacggccatgaaaagcgttatggaaggcaatgattttcgttttgaacgggctatggcgcacgcaggcataatgacgcgccagtttaaaagcggtttcgttcgcttcggtgccggaattcataaacagcacgcgctcggcaaacgtggcgtcgatcagtttacgtcccagacgcaacgctggttcattggtaaaaacgttactggtatgccacaaggtttccccctgggatttcagcgcctcgaccagcgccggatggcaatggcccagcgcagtcactgcaatcccgccggcgaaatcaatatactctttgccctgctgatcccatactcggctgcctttacctttgaccggaataaagtccgccggtgcataaacaggcagaatcacctcatcaaaagttgcgcgcgtaatagccgtttgttcagttgccatatcattaccacccggttaagtagaaatgccagtgaaattataatcacaaaatatgaataaaaaatcactcaatagcaaccacaaatcaacgccggaggaaatttttcagcagagcgtgtccttgttcgctgagaatactttccgggtggaactgcacgccttccagatcccactcgcggtggcgaatgcccataatctcctgcgtttcgctccaggcggtgatctcaaaacactcaggcaacgtggcagggtcgacaatcagcgagtggtaacgtgtcacggttaacgggctgggcaatccccgaaacacgccctgtccattatgcgtaacaggtgacgttttaccgtgcatcactttcgctgcccgcactaccgacgcaccaaaggcctgcgccatcgcctgatgacccaggcaaacgcccagcatcggaatacgtccggcataatggcggatgaccgccagtgaaatgccagcgtcattcggcgtacaggggccaggagagataacgattttttgcgggttcaaagcgtcaatgtgcgccagcgttagcgcatcattgcgccggacctgcacttccgcgcccagttcacaaaaatactggtagaggttccaggtaaaggaatcatagttatcgataagcaggatcatggcggctccgggtgagtagaaccgcactattttactcagtttcgcgagcttcgcttatcgctttctgaaaaatcgcccgcaaagcggagagatcgcccatcgcgccgctctggttcgcctgcttccatgtttcaaccgcaataccttgccaactcagcgcgtagcctgcatgtagcgccagttgttcaaagaagatgcgctgcgccaacccgctcccaaaacgaaacggatgaagcacattaatttcacagtagtaatgcgccagccgctcgacaaacttctcgtgcgccagaccaaccaggtagccctcttcttccagatcctgcatcagagcgttgccctctttttcgatataggcaaagtggcaaaaacgggtatcgccctggtaaatatcgacctcccgcagttgccctgcccagtcgaaaatatcctgatagagctggcgatgaatcgcgcacagatgaggcaagccgcgtaccagcggccccagttcaatcgtagcggcgcggagcgcggtcatttcgtatgccgcttgcgccagtcgctgggcctgatgaatccccagccgattacgcatcacattcagccccggatagaggtacggatcgcgtccttcgccaaatttatcgctcatagtgcctccgaagctcgtcaagacgtaccagcgcttcgtcggcagtcagggttactaaggggatctcaataccttcgagacggcggctttgctggaagttaacgttgcgccgttgctcccaaaagcgtgacttttgtttatcggtaagtttcttcacctggcctccctgaatatgcctgtgcttgaccacaagtataagcagcaatttcaggttacgctgagacagggagaaaacgcgggcggctcgcacccgcgcaggcatgttttatggcaggactttcgcggaaaggataacgactggttttgtcggcacattctgataaggcccgacatcgtgcgtcggtacctgtgagattttatcggcgacatccataccttttaccactttaccaaataccgcatagccaaagtcgcgctggccgtggtcgagaaaagcgttatccgcgacgttaataaagaactggctggtggcgctgtctttatctgcggtgcgcgccatcgcgatcgtgccgcgagtattacgcagaccgttgtcggcttcattcttaataggcggattcggtttcttctgctgcatctgctcgttaaaaccaccaccctgaatcataaagccaggaataacgcggtgaaacgtagtgttgttatagaaaccactgttgacgtaatcgacaaagtttttcacagaaaccggcgctttctggctgttcagctccagctcaatattcccggcggaggtggttaacagcacatgaggatcgccttttgctgccaacgctgcgggagaaagagcagaaagagcgaaaacagctgcgacagccgccagagtcgatttgagcatgagatttccttaaagagagcagaaataaagcaagtggaatgattttaaagagccttcctgggccaggccagccctttacctaattttacgtatatgaaacaaatgtaacgttacgacgcaacgccgtattcttgcaatatgatgtgacaaacatcacattaaaaaatgcaatgaacattactatcactaataattatttaaatgcatcacaaaagcgcctaaaatctgcccgcttaacgcgccctccacgcgcttcacttctcttcaaggccagacatgactaacagcaaccgcatcaagctcacatggatcagctttctttcctacgccctgaccggggcgctggtgattgtcaccgggatggtgatgggaaatatcgcagactattttcatctgcccgtttccagcatgagtaacacctttacttttctgaacgccgggattttgatctcgatcttcctcaatgcgtggctgatggaaatcatcccgctgaaaacacagctacgctttggttttatcctgatggtgctggcggtggccgggctgatgttcggccatagcctggcgttgttctcagcggcgatgtttgtgctggggctggtcagcgggatcaccatgtcgattggcaccttcctgattacgcaactttatgaagggcgtcagcgcggttcccgactgctgtttaccgactccttcttcagcatggcggggatgatttttcctatggtcgccgccttcctgctggcgcgtagtattgagtggtactgggtctacgcctgcatcggcctggtctacctggcgattttcatcctgaccttcggctgtgaatttccggcgctgggtaaacatgcgcagcactctcaggcgcctgtcgtcaaagaaaaatggggcattggcgtactgtttctggccgtcgccgcgctgtgctatatcctcggtcaattaggctttatctcctgggtgccggaatacgccaaaggcctcggcatgagcctgaatgacgccggggcgctggtgagtgatttctggatgtcctatatgtttggcatgtgggcgttcagctttatcctgcgctttttcgatctgcaacgcattctgaccgtactggcgggtatggcggcggtactgatgtatctgtttattaccggcacgcaggcgcatatgccgtggtttattctgacgctgggcttcttctccagcgccatttatacctccatcattacgctgggatcgcagcaaacgaaagtggcctcgcctaagctggttaacttcattctgacctgcggcaccatcggaacaatgctgaccttcgtcgtcaccggcccgattgtagcgcacagcggcccacaggcggcgttactcaccgcgaatggtctgtatgcggtggtctttgtgatgtgctttgcgctcggctttgtatcccgtcatcgtcagcatagcgcgccggctacgcattgataatccttgccggatggagacatcgccctccggcactctatcccccctcctgacggggtaggcctgttggtctaaaaacccctcattttgtatgttatttgtacaaacctgaaaagcctgacaattccgccacttataaaaatccagacaaatcagccatatacccattaagaggtatataaaggtgaatttgatttacatcaataagcggggttgctgaatcgttaaggtaggcggtaatagaaaagaaatcgaggcaaaaatgagcaaagtcagactcgctattatcggtaatggtatggtcggccaccgctttattgaggatctccttgataaatccgacgctagcctgttcgacattaccgtgttctgtgaagaaccccgtaaagcctatgaccgtgtccacctgtcatcctacttctctcaccacaccgcggaagagctctctctggtgcgtgaaggattttacgagaagcacggcgtaaaggtactggttggcgaacgcgcaattaccattaaccgtcaggagaaagtgattcactccagcgcgggtcgtaccgtttattatgacaagctgatcatggcgaccggttcctatccgtggatcccgccgattaaaggctccgaaacccaggattgcttcgtttaccgtaccattgaagacctcaacgctatcgaagcctgcgcccgtcgcagcaagcgcggggcggtggtcggcggcggtctgctggggctggaagccgctggcgcgctgaaaaacctcggcgtggaaacgcacgtcattgaatttgcgccaatgctgatggcagaacagctcgatcagatgggcggcgagcagctacgtcgcaagatcgaaagcatgggcgtgcgtgtacacaccagtaaaaacacgcaagagattgttcagcagggtaacgaagcgcgtaagactatgcgttttgccgacggcagcgagctggaagtcgatttcatcgtcttctctaccggtattcgcccccgcgacaagctggctacccagtgcggtctggccgtcgcgcagcgcggcgggatcgtgattaacgacacctgccagacgtccgacccggatatctacgctatcggcgagtgcgccagttggaacaaccgcgtttacggtctggtcgcaccaggctataaaatggcccaggtcgccgttgaccacatcctcggcagtgaaaacgcctttgaaggggcggatctcagcgccaagctgaagctgctgggcgtggacgtcggcggcatcggcgacgcgcatggccgcacgccgggcgcgcgtagttacgtttacctcgatgaaagcaaagaagtctacaaacgtctaattgtcagcgaagataacaaaacgctgctcggcgcagtactggtcggcgacaccagcgattacggcaatttgctgcaactggtactgaacgccatcgaactgccggaaaacccggattcgctgatcctgccgtcgcacgcgggcagtggtaaacccgctatcggcgtggataaactgccggacagcgcgcagatctgctcctgcttcgatgtgactaaaggcgatctgatcgccgctatcaataaaggctgccataccgtggcggcgctgaaagcggaaaccaaagccggaaccggctgcggcggctgcatcccgctggtgacgcaggtactgaacgccgaactggcgaaacagggtattgaagtcaacaacaacctgtgcgagcactttgcttattctcgtcaggaactgttccacttaatccgcgtggaaggtatcaaaacctttgaagaactgctggcgaaacacggtaaaggctacggctgcgaagtgtgtaagccgaccgtcggttcgctgctggcgtcgtgctggaacgaatacatcctcaagccgcagcacacgccgctacaggatactaacgataacttcctagcgaatatccagaaagacggtacttactcggtgatcccgcgctcggcgggcggcgaaatcaccccggaaggtctggtggccgtgggtcgtatcgcccgcgagtttaacctctataccaaaatcaccggttctcagcgtatcggcctgtttggcgcgcaaaaagacgatctgccggaaatctggcgtcagttgattgaagccggtttcgaaaccggtcacgcgtatgccaaagcgctgcggatggcgaaaacctgcgtcggcagcacctggtgccgctacggcgtgggcgacagcgtcggtttcggcgtggagctggaaaaccgctacaaaggcattcgtaccccgcacaaaatgaaattcggcgtctccggctgtacccgtgaatgtgcggaagcgcagggcaaagatgtgggtatcatcgccacggagaaaggctggaacctgtacgtctgcggtaacggcgggatgaaaccgcgtcatgcggatctgctggcagccgatctcgatcgcgacacgctgatcaagtacctcgaccgctttatgatgttctacatccgtactgccgacaaactgacccgtaccgcgccgtggctggataatctggaaggcggcatcgagtacctgaaatcggtcatcatcgacgataagctgggcctgaacgaacatctggaagaagagatggcgcgcctgcgcgcagcggtggtctgcgagtggacagaaaccgttaacaccccatccgcacaggttcgctttaagcactttatcaacagcgacaaacgcgacccgaacgtccaggttgtgcctgaacgtgaacagcatcgtccggccacgccgtatgaacgtatcccggtcactctggtggaggaaaacgcatgagtcagtggcaaaacatctgcaaaatcgatgacatcctgccgggaaccggcgtctgcgcgctgtcaggcggcgagcaggtggcaattttccgtccttaccatagcgatcaggtgtttgcgatcagcaacatcgacccgttctttgaggccagtgtgctgtctcgtgggctgattgcggaacaccagggcgaactgtgggtcgccagcccgttgaaaaagcagcgcttccgcctgagcgatggtttatgcatggaagatgagcagttttctgtgaaacattacgacgcgcgggtaaaagacggcgtggtgcagttgcgcggttaattatttttgggaggcgcaacgcctccccttttttgtattttttttcattttaattgttatcacaaaatcatttgtactgcatcgcggcggcaactgagcaacaaattcgtcaggaacgaatttgaacagccgctggctgccttcggtgagggacaaggatgtccctcattaatccccaggagcatagttcactatgtgactggggtgagcgagggcagccaacaaagaggcagtgcaaaggatgaagtgagaaaaggataatcaaatgtttacagacactatcaataagtgtgcggctaacgctgcgcgcatcgcacgcctgtcggcgaataatccgctcggcttctgggtcagttcggcaatggccggggcttatgtcggtctcggcatcattcttattttcaccctcggcaatctgctcgacccgtccgtacgtcctctggtgatgggagccaccttcggtatcgccttaacgctggtcatcatcgccggttccgaactgtttaccggccacaccatgttcctgacgctgggcgtcaaagcaggcaccatcagccacggtcaaatgtgggctatcctgccgcaaacctggctcggcaacctggtcggttccgtgtttgtcgccctgctttacagctggggcggcggcagtttattgccggtcgataccagcatcgttcactcagtcgcgctggcgaaaaccaccgcgcccgccacggtactgttcttcaaaggcgcgctgtgtaactggctggtttgtctggcaatctggatggcaatccgcaccgaaggcacggcaaaatttcttgctatctggtggtgtctgctggcgtttatcgcttccggctacgagcactccgtcgcgaatatgacgctgttcgccctctcctggtttggtcatcacagcgacgcctataccctggccggaattggtcataacctgttgtgggtgacactcggtaatactttgtccggtgtcgtattcatgggattgggttattggtatgctacgccaaaatcggagcgtccggctccggcaaaaatcaatcagccagaggctgctgccaataattaaggggtaatgtcgtggaccatttgcctatattttgtcaattacgcgaccgcgactgtctgatcgtcggcggtggcgatgtcgcagaacgcaaagcacggttactgctggaagcaggcgcacgtttaacggtcaatgcgctaacctttattccacagttcaccgtatgggcaaatgaaggcatgttgactctggttgagggaccgttcgacgaaacgcttctcgactcgtgttggctggcgatcgcggccactgacgacgataccgtcaaccagcgcgtcagcgacgcggcggagtcacgccgtatcttttgcaacgtggtggatgcgccgaaagccgccagctttatcatgccctccattattgaccgctcgccgctgatggtcgccgtctcctcgggcggcacctccccggtgctggcgcgtctgctgcgcgagaaactggaatcgctgctgccgcagcatctggggcaggtcgcgcgctatgccgggcaactccgcgcccgagtgaaaaagcagtttgccacgatgggcgagcgtcgtcgcttctgggaaaaatttttcgtcaatgaccggctggcgcagtcgctggcgaatgccgatgagaaagcggttaacgcgacaaccgaacgcctgtttagcgaaccgctggatcaccgtggcgaagtcgtgctggtcggcgccgggccgggcgatgccggactgctgacgctgaaagggttacaacaaatccaacaggcggatatcgtggtttacgatcgcctcgtctccgacgacattatgaacctggtacgccgcgatgccgatcgggtctttgtggggaaacgcgcgggttaccactgcgtcccacaggaggaaatcaaccagatcctgctgcgtgaagcgcaaaaaggtaaacgcgtggtacgcctgaaaggcggcgatccctttatctttggtcgcggcggcgaagagctggaaacgctgtgtcatgccggtattcctttctcggtagtgccggggattaccgcggcttccggctgctccgcctactccggtattccgctaactcatcgcgattacgcccagagcgtacgtctggtcacgggtcacctgaaaaccggcggcgagctggactgggaaaacctggcggcagaaaaacagacgctggtgttctacatggggctgaatcaggcagcgactatccaggaaaaactgatcgcattcggtatgcaggccgatatgccggttgcgctggtagaaaacggtacctccgtgaagcaacgcgtcgtccacggtgtgctgacgcagctcggtgaattagcgcaacaggttgaaagcccggcgctgattatcgttggtcgcgtggtagccttacgcgataaattaaattggttctctaatcattaattaaaataacgccctgttattcagggctttattttacaactactcgtaatctcaaattatttttacttaaaagtgaattaagaaactaactttaaatacaccggacaaatttaaataataataattctgcctaaaaacccttttactcgtcaaattcacctcttattcattcatacaataaataacaccgttaagcactcaatttgacctgacctggttatcgggtgataaaataaacactaaagcataatttttcttctggccatttcatcattgcctgtaccgctctctgcatatgtttagtacgcaaggaaaatattaattaaggatgaaccctatgcaaaagaaaaaacttatttctatcgctatcgctttaacgctacaaagttattacattccggccatcgccgcagaaaataacgatgatgaaaaagaatgtcccagtaatatctcctccctgcctaaagaaaaacgcgcaaaactctcaccgacctgccttgctacacctgaaaatgataatcactggggctgggttgctggcggcgttgctgcattggtcgcaggtgtggctattggcgttgaaaataacggtggcggagattctaatcattcttataccccccctaagcccgataatggcggcgacgtcaccccgcccgacgatggcggcaacgtcaccccgcccgacgatggcggcaacgtcaccccgcccgacgatggcggcgatgacaatgtgaccccgcccgacgatagtggcgatgacgatgtggccccgcctgacgatagcggcgatgacgatgtaaccccgcccgacgatagcggcgatgatgatgtgaccccgcccgacgatagcggcgatggcgatgtgaccccgcccgacgatagcggcgatgacgatgtaaccccgcccgacgatagcggcgatgacgatgtgaccccgcctgacgatagcggcgatgacgatgtaaccccgcccgacgatagcggcgatgacgatgtgaccccgcccgatgatagcggcgatgacgatgtgaccccgcccgatgatagcggcgatgacgatgtaaccccgcccgatgatagcggcgatgacgacgacacgcccccagatgactctgttattaccttcagcaacggcgtcaccatcgataaaggcaaagacaccctgaccttcgacagcttcaaactggataacggcagcgttcttgagggtgccgtgtggaattattcagaacaggacaaccagtggcagctcaccaccgcggacggtaaaacgctgaacgtcaccggctgggacgtgaccgacgccaatgccgccgtgattgaaggcacccaggaaaacggtctctactggaagtacgacagccggggctatctgattattgccgacgataacaccaccgttatcagcggcgatgaccaggcgcataattccgatcgcggcatggatatcagcggccaggatcgcaccggcgtgattatttccggcgatagaaccgtcaacacgctcaccggggactccagtgtgaccgacggtgccaccggcatggttatctccggtgacggcaccaccaacaccatttcgggccactccacggtggacaacgccaccggcgcgctgatttccggcaacggcaccaccaccaatttcgccggtgacattgccgtgagcggcggcggcaccgccatcatcatcgacggcgacaacgccacgattaagaataccggtacctctgacatcagcggcgcaggctccaccggcaccgtcattgacggcaataacgcccgcgtcaacaatgacggtgatatgaccatcaccgacggcggcaccggcggccacattaccggcgacaacgtggttatcgataacgccgggagcactaccgtcagcggcgcagacgccacggcgctgtatatcgaaggcgacaacgcgctcgttatcaacgaaggtaatcaaactatctctggcggcgccgtcggtacgcgcattgacggcgacgacgcccataccaccaataccggtgatatcgcggtggatggcgcgggctctgccgccgtgattatcaacggcgacaacggcagcctgacccaggcgggcgatctgctggtcaccgacggcgcgatgggcatcatcacctatggcaccggaaatgaagcaaaaaataccggcaacgccaccgtacgtgatgcggactcggtgggttttgtggttgcaggcgaaaaaaacaccttcaaaaacaaaggggatattgacgtcagccttaacggcaccggcgcgctggtgagcggcgatatgtcgcaggttacgctggatggcgatattaacgttgtctcagtccaggacagcgaaggcgtgtttagctcagcgacaggggtgagcgtgagcggcgacagcaacgccgttgatatcaccggcaacgtaaatatcagcgccgactacgggcaggatgatctggctgccggggctcccccgttaaccggcgttgtcgtcggcggtaacggcaataccgttacccttaatggcgcgctgaatattgatgacaacgatctgtccgccaccggcggacaatacctggacgttgttggcctgagcgtaacaggtgatgataacgacgttgagattgacggcggtattaatatcacccacagcgaggatccacttgatggaacctctgcagacattaccggcatcagcgtcagcggtaacagtaccgttacgctaaacggtcattctaccattgataccaacacggtagtgggggggcacgttgtactggcgcgggtcaacaacggcggctccctgattctgggtgatgactcagttgttgacgttaatgtcagttatatacccacaggctattacacctacaacgcgttgctgatggctgatggcgaaggcacatcaattgaaaataaaggcgatattacaagccatggcgtgtattccgtcattcgcgcagataacggctcggaagtcagcaacagcggagatattctggtctacgcgaccagtagcaacagtagtgaggatcgtgcagccatcacaagggctagtggcgagggatcggctgttcataacaaagccggcggcgatatcaccctcatttctgatcagacgccgcagggcagtggcggtattgaagtatacccattgaaatggtacacccacaccttttacgccatgatggcttcggattatggcgatgtcgttaacgatgagggcgccacgatccatttgcagggggcaggtgtatatggcgttaccgccagccgaggtaaagcactaaacgaaggcaatatctatctggatggccttgtcccgacgctggacgatgaaaataacatcaccagcaccagctactggcagccatcatcgctctatctcaccagctcaggaatggtggcgggttccaccgatgccgatggcgacgccaccgccatcaacaccggcaacattaccgtcaacaacgccgggttcggcatgatggcgcttaatggcggcaccgccattaaccagggcgtgatcaccctgaccgccgatgacggcgtgaccggtcaggcagacgagctggtcgggatggcggcgctcaacggcggcgtcgtcatcaacgacaccagcggcgtgattaacatcgacgccgattacggccaggcgtttctgagcgacagttccagctacatcatcaataacggctctatcaaccttaacggcagcccgatggatgatactgattcacacatgggcggcacgccaacggacaaaatctggattcagtctctgcccggcagcggcgacagcgacaccaggacctccgacacaggtttcttcaccgccggtacgctggccaactacggtactgaaaccctgaacggcgatgtggacgttaacgggggctggctgtacaacgaagcgggcgcctcgctcaccgtcaacggcaccgtgacgattaacggcggggctaacgcgctggctaactacgggacgctggacgcggacgctatttccacctggcacagcctctttaatgaagcggacggcagcatcaccaccgatctgttaacccttaatggcgacgtcactttttacaataacggcgatttcaccggctccatagcgggcaccagctaccagcaggaaatcgtcaatactggcgatatgacggtggcggaagatggcaaatcgctggtcagcggcagcttctatttctataacgaagaggacgctacgcttaccaacagcggcagcgcggtggaaggcggcgagaacaccatcatcaatctgacgcgcgccaacgattcgctgacccaggtgaacagcggcaccatcaccgccactaacggttacagcgccatcaccacggtcaacggcagcaatgaccccaaatggatctggaacaccgcaaccggcgtgattaacggtattaacccggatgcgccgctaatcaatttgggccgcggctataacttcggcaaccagggcactatcaacgtgcagggcgataacgccgtggcgattagcggcggcaccagcagttatgtcattaacctggtcaatagcggcaccatcaacgtcggtaccgagcagggcaaggaggacggcaccaacggcaccgggcttatcggcatcaagggcaacggtaatgccaccaccataaacaacaccgcagacggcgtgatcaacgtttacgcggatgactcgtatgcgtttggcggcaagaccaaagccatcatcaacaacggcgaaatcaacctgctgtgcgacagcggctgcgacatctacgcgccgggtactacgggcacgcagaacgaccataacgggacagcggacatcgtcatcccggatgcgactaccgccccgaccgagggcagcatcccgacgccgccagcggatcccaacgcgccgcagcagctctccaactatattgttggcaccaacgccgacggtagctccggtacgctgaaagccaataacctggtgattggcgacaacgtgaaggtggataccggctttaccagcggtacggcggataccaccgtggtggtggataacgccttcaccggcagcaatatccagggcgcggacaacatcacttccaccagcgtggtgtggaacgcccagggtagccaggatgccgacggcaacgttgacgtcaccatgaccaaaaacgcctatgccgatgtggcgaccgacagctcggtaagcgacgtggcgcaggcgctggacgccggttacaccaacaacgagctgtacaccagccttaatgtggggactaccgccgagctgaacagcgcactcaagcaggtgagcggtgctcaagccaccacggtattccgtgaagcgcgtgtactcagcaaccgctttaccatgctggccgacgccgcgccgcaaattaaagatggtctggcgttcaacgtggtggcgaaaggcgacccacgtgcggagctgggcaacaacacccagtacgacatgctggcattacgccagacgttggatctcaccgccagccagaatctgacgctggagtacggtattgcgcgtctggatggcgacggttcgaaaactgcgggcgataacggcctgacaggcgactacagccagttctttggcctgaagcacagcatggcgtttgatgaaggtctggcgtggaacaacagcctacgctatgacgtgcataacctcgacagcagccgttctgttgcctatggcgatgtcaacaaaattgccgattccgacatgcgtcagcagtaccttgagtttcgcagtgaaggggcgaaaactttcaccatgatgggcgatgcgctgaaagtcacgccgtatgccggggtgaaattccgtcacaccatggaagatggctacaaagagcgcagcgccggagattttaacctgtcgatgaactctggcaacgaaacggcggtagactctattgtcggcctgaagctggattacgccgggaaagacggctggagcgccaccgctaccctggaaggtggcccgaacctgagctacagcaagagccagcgtacagcgtcattacagggtgcggcgggtcaatcgttcggcgtggatgacggtcaaaaaggcggcggcgttaatggtctggcaaccatcggcgtgaaatacagcagcaatgataccgcgctacatctggatgcctaccagtggaaggaagacggtatcagcgataaaggctttatgcttaacgttaagaaaacatttcgttaaataaacgacattatataacactaataaatatcctccggcatagccggaggtttttcagatgcgcctataaggctctcttaccagccgcgccctaacaggcgcatacgatctgacatttgcatcaaacttcgttacttacggcccgtaaacgggctgcccggatacgggatcgataattgctcacccattttatcctcttcaagctggtgctttatgtagtcctgtatcttcgccgtgttcttacccaccgtatcgacatagtaccctctgcaccagaactccctgttcctgtatttgaattttagatccccaaactgctcgtaaagcatcagactacttttacccttcagatatcccatgaaactcgacacactcatcttcggcgggatctccagaagcatgtgaatatgatctgcacaacattctgcttccagaattcgtacgtttttccattcacacaattttcttaatatgctgcctactgccctacgcttctctccatagaacgcttgtcttcggtatttgggcgcgaaaactatgtgatatttacagttccatcgggtgtgcgctaagctcttttcgtcccccattgggacccccttttgatttcttgttgaacttttgcagttgccagaccgcaagatgttttaacaaatcaaaaggggttttaataactggcttaaagctgaaagctttccggaacccccagcctagctgggggttttccatagacaataaaggccgcttattattaagcggcctttttaaatcatatcccctggtaaagataaagtccttatttggactacctggatgattcattaattgctatcgtactatacgctaaatagatcttatatttattccaccagtagtgctcgttttatcaacaaggattttgaaatgtttaaatttgtaaaaattgccgttgtggcaggggttctggcgacgctcactgcttgtactggtcatatcgaaaacaaaaaaaataactgcagctacgattatttgctgcaccctgcaatttctatttctaaaattattggcggttgcggcccggctgccgatcaataatagaaacgactgcgcagatacaaaaaaaccgggattttcccggtttttttacaggtctgataaacggtacggcacaggtgccttgtccaacttacgctcgttggtaggcccgataagctagcgccatcgggcacgcaataacccttacggtttcgccacaaagccaatggcttcgtaaacggctttcagcgtttcggccgcacgtgcgctggctttttccgccccgtctttcatcaccttctgcaagaacgcttcgtcgttgcggaaacggtgatagcgctcctgcaactcagacaacattccggaaaccgcctccgccacttcgcctttcaaatggccatacattttaccttcaaactgtttttccagttcaggaatgctctgaccggtcacggcggaaagaatatccagcaggttagagacacccgctttctctttcacatcataacgcaccaccggcggctcgtcggagtcagtgaccgcacgtttgattttcttcactaccgatttcggatcttccagcaagccgatcacgttattacggttatcgtccgatttggacattttctttgtcggctccagcagcgacatcacgcgcgcgccggatttgggaataaacggttccggtactttgaaaatatcgccatacagcccgttaaaacgctgggcgatatcgcggctcagttccagatgctgcttctgatcttcgcctaccggcaccagattggtttggtacaacagaatgtctgccgccatcagcaccgggtaatcaaacaggccggcgttaatgttttccgcatagcgcgcagatttatctttaaactgcgtcatacggctcagctcgccgaaataggtatagcagttcagcgcccagccaagctgcgcatgttccggcacatgggactgaacgaaaatagtgctcttttcaggatcaataccacatgccaggtacagcgccagcgtatccagcgtcgctttacgtagctgctgcgcgtcctgacgcacggtaatagcatgttggtctacgatgcagtagatgcaatgatagtcatcctgcatgtttacccactgacgcaatgcccccatatagttgccaatggtcaattcacctgagggctgtgcgccactaaaaacgatgggcttagtcattttttatttcctggttatcgctatgcggaagcccaagtgcgggcaaaagatcgttaaaactgtcataaatgacgtccggctcgctaagagcgatcgcttcgccataattgtagccgtatgtcaggccaaccgaagggcagcccgccgcttttgcagcctgaatatcattacgcgaatcgccgacaaaaagcatctgctccggcatcatgcccagccggcttgccaccagcaacagcggctccggatgcggcttcttattttgcacatcatcgccgccgataaccacactaaagtatttggcgatatcaagcgattccagcaacggcgcgacgaacggcgtcggcttattcgtcaccagacctaatgacaatccgctggcgtgcagcgcgcccagcgtgtcggcgacatggggaaataaaacggtgccctcttccgccacttcgccataatacctgtcgaacagcttacgcagaatacgtacctgttcctcggcaggaatatcttcatcaacgggcggtttacccatcgtcttacgcagcgtggcgcgctcctcgcgagcccaggtcagcgcgcgttccatcaatacgtctgcgccgttaccaatccaggtaatcacgcgctcctcgcccgcgaccggcagttccagcgcatacagcgccatatccaccgccgcggcaagacccggcgcgctatccaccagcgtgccgtcaagatcaaaggcgacgccccgaatattctgcaacttatccatgagttacctttgccagctcactgcgcatttcatcaatcacttttttatagtcgggtttatcgaaaattgccgaccccgcaacaaacatgtccgcacctgctgcggcgatctcgccgatattgttcaccttcacgccgccgtccacttccaggcgaatgtcgtaaccggacgcatcaatgcggcgacgcacttcgcgcagtttatccagcgtctgcggaataaaagactggccgccgaagcctgggttcacggacatcagcaggatcacatccagtttgtccatgacgtaatcgagataactgagcggcgttgccgggttgaataccagccccgctttacagccgtgttctttaatcagctgtagcgtgcggtcaacatgttcggaggcttccgggtgaaaggtaatgatgctcgcgccagcggcggcaaagtcgggcacgatacggtcgactggcttgaccatcaggtggacatcaataggcgcggtaataccgtactgacgcagggatttcagcaccatcgggccgatagtcaggttcggcacatagtgattatccatgacgtcaaagtgtacaacatcagcaccggcagccagcgctttggcggtgtcttcacccaggcgagcaaaatcagccgacagaattgagggggcaatcaaatactgtttcatccgcttctccttgagaattattttcttgcaggcgttgcgactcctggttggtacagagccagcagttcgtccacctttttacgtgtgccgccgttgctgcttatactgcgtctaactttgacgacatgcaattttgcgagttgataccactcgcgtgtgagcgccgtatcatggttggaaatgagcaccggtatccggttactgaccagattctcagcgatttccgccagatgcgcttgttgcgtcaggctaaaactattggtgtgatacgctgtgaagttagccgtggcggacaacggcgcataaggcggatcgcaatagaccaccgacgacttgtccgcacgcgccatactgtctgcgtatgactcacagtaaaagaacgcattctgcgctttttctgcaaagtggtacaactccgcttccgggaagtaaggtcttttataacgaccaaacggtacattaaattccccgcgtaagttatagcgacagagtccgttataaccgtagcggttcagatataaaaacagtaccgcccgacgaaaggggtcctggcaggtgttgaactcctcgcggagttggtaatagacctcagcctggttagtttcaggcataaacagctcgcgcgaagcctgtacatactcgtcagtacgtaacttcacgatgttatagaggctaataaggtcgctgttgatatcggcgaggatataacgagaaaagtcggtgttaagaaacaccgatccggcacccacaaaaggttcgacaaggcactcgccttttggcaaatgtcgtttgatatcatcaagcagagggtattttccccctgcccacttcaaaaaagcgcgattttttttcatgctgactaactaattacaccttctccggctgtggagaaagctccgacagcatcctgcgctttaggctgtgccgcgttgctttacggcgcatttgacggtagcaaatgcgcccctcgcgcctgtcctgaacaaaaatagctgtcagcgacactcacaggcaattgcaggacacagcctggattatttcagatcggcctgaacctgatgcaacggttttgcccacgggtttttcgcctgcacatcggcaggtaaggtggacaccgcacgtttagcatcttctttcgaagcatacatccccgttaccagcacataccacggttgtccattacgcgtcgtctcgtataccacataatttttcaggttctctttcttcgcccaaccgttcaggttgtcgtaatttgaagaactactgagctgcaatgtgtagtggctggatggcgcgctctttaatgcgccaacgttgccggcgcttttcccgccgcctgcgacaggcgtcgtcgaggcttgcgctggcttcgcggtttgtaccggcgcagcgcttgccgtcgctgtcggcgcagccgtcgtggtggtcgctttcggcgtcgcggctggcgctgccggttccgtgcgtttcactggcgcgaccggtttcttcggttccgcagtggtggttttcgccgtggtctgcggtttcttaggttcaatgacggcctgtttacgttccggacgcgtggtatgacgctcggcaggttcgctaaccgccgcctgacgcgtcgtgctgccattgcgaactggcgcgacggttgcaggctctgtcggcaacgtagagttcaccgcaacattgttcatctgctctggattctgcgtcagcgcattattcagatcgccctgcacttccacgcgctgctgaccgtcagcgaccacaggcgactgtccctgcgtcggcgttgaagaaatcggcggcaacgaaatatcctgcgacgtattgcccgcggtttgttctgcggaggtggcgcccggcgcaggctgggtcgcattcgcctgatcggcggcgttaccggaaagatcgatactcttttcgccagaggccgacggctcgctggaagacgttgagggggctttcagcgcggagccgataccgataatcaacagcagcagcaccagcacgccaacgcccatcatcatgtattgacgagaggctggcttatgggccgcttttttacgcttacgtggacggcgttcaacacgctcttcgtccaccgtatcgtcttcatcggattcgtactcttcttcaacttcaggttcttcactacgcgctttacgcgtacgcgtcggacggcgatcgtcggcgtccagatcaacgtcatcaaagttgatctgcggttcactatcgcgttctgaagattgacgagaacgaccagtacgacgatcgctgggatcgggtttcagctcgtcttctggtttgaattcatccatttaacaccccactcaaaggttaatgcttacgacattgcacataacctgaagctaaaaaactgacatctacgcaatatcagtttgacctttcttgttgtcacgcctgctgacagtcagcaatcgcgctaagaacgacttcgtgcgacactccgccgcgcacttcacttttccctatggccagcggaagcactaaacgcagctcccccgctaacacttttttatctcgcagcatgtgcggcaaatagtcctgcgcggacatctcgcaagggccattgactggcaacccggcccgttcgagtagagcgatgatgcgctgcgtatcagcagaactgaactgccctaaacgctcggatgcgcgtgcagccatcactatacctgcggcaacggcttcaccatgtaaccaattgccatatcccatttccgcttcaatggcgtggccaaaggtatgtccaagattcagtaaagcacgtaagcccgcttcacgctcgtcggcggcaacaacttcggctttcagctcgcaacaacgacgaatacagtacgccatcgccgggccgtccagacgcaatagcgcatccagattaccttcaagccaggtgaagaagtccgcgtcgagtataatgccgtatttgatcacctctgccagtcccgatgtcagttcgcgtgcgggaagcgttttcaggcaatcaagatcgacaaccacagaagcgggttggtaaaacgcgccaatcatgtttttgccaaggggatggttgacggcggtcttcccgcccacggaagaatcaacctgcgacagtaaggtagttggcacctggatgaaacgaacgcctcgctggtagctggccgccgcaaaaccggtgagatcgccaatcacgccgccgccaagcgcgaccagcgtggtatcacgaccatgcggttttttcagtaacgccgtaaacaccgtatccagcaccgtcaggctcttatactgctcgccgtcaggaagaatcacgctgtctacgttaacgcccgcccgttcgagtacgccgcgaaccttgtccagataaagcggcgccagggtttcgttggtcactaacatgacctgatcgcctgatttcagcggcaagaatgaagctggttcgttaaacaaaccagccgcgatggtgatcgggtaactacgttccccgagagtgactgtaatcctctccatgacgcgacatccaccttagttacttgtgcccgcttacccagcgtattctgcttgaattagttgctttccagcatatgaataatctggtttgccacaaccttagcgctttgatcgtcggtgcgaatggtgacgtcggcaatctcttcgtacagcggattgcgttcgttagccagcgcttccagaacttcgcgaggcggtgcttcaacctgcaacagcgggcgttttttatcacgctgcgtgcgcgccagttgtttttcgatggtcgtttcaaggtagaccacgacgccacgcgcggagagacggttacgcgtttcacgcgattttacagagccaccgccggttgccagcacaataccctgtttttccgtcaattcgttgataactttttcttcacgattacggaagccgtcttcaccttcaacatcgaagacccagcccacatcagctccggttcgtttctcaatctcttgatcagaatcgtaaaattccatattgagttgttgagctaactggcgcccaatagtgctttttccggcacccataggcccaaccagaaagatattgcgtttctctgccattttttcggtactactaagactattcgttaatggtaaacccgcttcacagacacccagcgcagcaggacatgaactgaaacctcataagatattgcgagagtcagactgaaaattatctcaatactcaagcgggtttggcaactgaataaatcaccaagcctgattgttgcaaaacccgagttagcgttgccgaatggcgaccagaacaacatatccggcctacaaattgctctactttcaaacaattgtgcgcaatccgcagaaccaatacgtctgcatcagcggacattcagccgtttatcatcggtcttatgcacaccttcggcaaggcaaagcgcattaatcaatgcgtaagcaacgaaaagcacgactctcaaatcggtactccttgtatgctaaatacatccgcacgtcaaatcccgcagatgcgttcagtgcaaaaacagcgcttttttatgcataaattattctgtcgccaccagtctgggggtgataaacaccactaattcgcgtcgctcgtcctctttaccgtcatggcggaagagctgaccaagccagggaatatcccccaacagcggcacgctatcgctacccgatttattttttcgcgaaaaaataccgcccagcgccagcgtctcgccgctttttacctctacctgcgtttcaatttcctgtttatctatcgccagcacttcgccgtcagcctgttgtagtacctgaccgggaacattctggctgatatgtaacttcaggcggatgcgccctttttgcaaaacggtgggcgtcacctccattcccagtaccgcttctttaaattccacggaggtcgcgccgctttcgccgctggaaacctgataaggaatttcgctgccttgcttgatactggctggctgtagatgcgaagccagcagccgggggctggcgataatatccaacagctgcttttgttccagcgctgacagctccagatccagcaagcgtccgttaatgcgcccgatgttaaacccgacgcgtgaggtggcggcggcgacagataaatcactggaaagcgtcgtcacgtcacccaccgagcccgcttgcgtcgcgtcagccagcgtccactttacgcccagttcccgtagactcttttcgttaatggtaacgatatgcgccgccagctccacctgcgccaccggcagatccatttgcgatacccatttttccagctccgccaaggccgcgcggttatcgcgcaacagcaggcggttggtgcgcttatctaccatgatggttcccttcgcgctcaggagtttctcgcccgctttcgccagttcgccggcatcggcgtattgcaggctaatgctgcggttttccagcggtaaattagcctgaaaccttaaccgctcggcatcctgccgcgcactgtgttctttctgccaggcctgtgaatgaacatggagaatattcccctcctgacgtagcaccagccccgcgctattgaccaccgtctgtagcgcctgtttccacggcacatccgtcagatgtagcgataatgtcccgctgacgtccggcgacaccaccagattctgccgctcctgctcggctaaagtctgcaaaacctgcaccacagggacgtcatcaaccaccagcgtcactttcgccgcttttcccgcctgcgcggcgggcatcaaggctatcagtattatggctatccatcgcttcattgtccgctccctgacgtagccaccgccactgcggcggcgcacaatttttaccggtcgttaacgttaaggtttccgccgtcaggcggacaatcgtccaaccgttttccagcgtctgcccttcttccactcgtcgccatttttgctgactgtctttaagaatgcctgtccatcgctcgcctttacgcaccgcgccctgataccgccactgcgagagttccgctatccggcagcgatcttccggcgggcggaagggatcgcgcattcctgtcaacatcagcaaacaaaaacagagcaatacactgcggctagccttcattcgccaggcgctccagttgcagcgtcatcaataattccgccccctctttacgcaatgaaaaccgacttacgctcatctcgctttcggccaaccggacaaacagcgacggcaccgcatcccaggacgttttcagcgccatttctcccccctgcgccgatggctgccagtgcagcaaacgcaggggaggcgcctggaaatctaacggcgaaaaaggacgcggattttccactgtgcgcccgaaaagcggttcagccgcgacgctcagacggcgcagatgacgccactgttgccgggcggcctcgcgctgctggcttaaccgcgtttgttgcgtatccaacgttttccagccgggatagcccacagataacgcaaccgtcagcgtcaggcacagcacgcctgcacaccaataaaaaacccgaccacggcgcgacatcccgtaccagatatcaaagagcgcgttcacgggcggcgctcctcgttaactgataatggaactgccagcgcccttgcgcatcctgccgcgtggcgcccgtgcggtttagcggaaaactgacatagtgacgaagtgatgtctcaagcgtgagcagggcgtcaaacgttctcgccagcccttccagctctagcgtctcttgctgataattgaggcttgtcagccatgcctgctctggcaacaggttggcaaggtcagtcaagatagattgccaggcttgcgtcagttcacgctgcgcctgacgttgtaatcgcgcctgttgctgccgctgacgctgctgcaactgcggtatgttcgccgcaagcgccgtcgtgcgtccgttttccgtcgtcagtagcagctcgttaatcctcccctcctgccaaaaaaccaaccgggcgatcgtcgcgaggcttgctatcagcagcagggacgcgccccataccacgcaccacagccgcagacgcgctacgtaatgttggcgccgccaggggagcaaattgacagaatgcgccatcagcgtatctcccccatggctaaacccagcgcaatcgcaaagcgataaccgtccggcggaaccggcggttggcggacggtaacggcgtgccaggggtcgaattcgccttcggcgcataacgaaatatgttccggcacgacggataacgtcgcggcaaggtcatgcagcgtcatcgcctctcgcgccgatttacgtccccacgcatagcgcgtcgcccacagccactggctctcatcgcgccagaccagacattgccgccccgaaggtataaacggcagcaagcgctgtaacgcgcaggcatcgggcgttacagcagcgatgcgcacattgagcgtttgcgccagcgttaacagctctgaaatttctttgctttgcacggcggtaacgttgaacgcagggcttagcgcatcgtcctgaaagtcgaaacgcaataagtccggatccatatccagctcacgcgccatcgtttgtgaaagccatgcgacttgctcacgttcccgcagacgcatcggcggatgtggaaaagcgcgttgcaatgtccgatttgcgggaaaagagagataaatacggtgacgtagcggcagctcgcggctccagggtcgcagtacgtgagccagcgattgcgggtcaggaatcgtaccctctgccgtggaggcgttcatcagcggcagtcgccaccaacgttgcagagaccagcccgatgcgccgtgaataacggcgatggccagcgcttcatgctgctgaatatgcaatcctatttgccaggttttaaaagccataacggtcgatctccttatcacccgtcgcgttaacgggtatatcaatgcgtctggcttgcctttatactaccgcgcgtttgtttataaactgcccaaatgacactaaatgggaaatctccagtgaagttcgtaaagtatttattgatccttgcagtatgttgcatcctgctgggagcaggctcgatttatggcctttatcgctatattgagccacagctacctgacgtcgcgacattgaaagatgtgcgtttgcaaattccgatgcaggtttacagcgcggatggcgaacttatcgcgcaatatggcgaaaaacgtcgtattcccgttacgctcgatcaaattccgccggaaatgatcaacgcctttatcgccaccgaagatagccgcttttatgagcatcacggcattgacccggtaggtattttccgtgcggccagcgtcgcgctcttctccggtcacgcatcgcagggagcaagtaccattacccagcaactggcgcgaaacttcttccttagccccgaacgcacgctgatgcgcaagatcaaggaagcgtttctggcgattcgtattgagcagttgctgaataaaaatgagatcctcgaactctatctgaacaagatctatctcggctaccgcgcctatggcgttggcgcggcggcacaggtctactttggtaagacggtcgaccagcttagtctaagcgaaatggcggttatcgccgggctaccgaaagcgccttctacctttaacccgctctactcgatggatcgggcgatagcgcgccgtaacgtagtgctttcgcgaatgttaagcgagggatatatcactcaggcgcagtacgatcaggcccgtagcgaacctatcgacgcaaattatcacgcgccggaaatcgccttctccgcgccttatctgtcggaaatggtgcgccaggaaatgtataaccgttatggcgaaagcgcttacgaagatggttatcgtatttacacgaccatcacccgcaaagtgcagcaggccgcgcaacaggcggtgcgtaataacgtgctggactatgacatgcgccacggttatcgcggcccggcgaatgtgctatggaaagtgggcgaaacagcgtgggacagtaaaaaaattaccgatacgttgaaagcgttgccgacctacggaccgctgcttcccgccgtggtcaccagcgctaatccgcaagaggcgaccgctgcgcttgccgacggtacgtccgtttcgctacatatggaaggaatgcgttgggcgcggccttaccgctcggatacgcagcaggggccgacgccgcgtaaagttaccgatgtcgtccagacaggtcagcaaatctgggttcgtcaggtggataacgactggtggctggcgcaggtaccggaagtgaactccgcgctggtttcgcttaacccgcaaacaggcgcggtactggcgctggtcggcggtttcgattttaatcagagtaaatttaaccgcgcgacgcaagctttgcgtcaggtggggtcgaacatcaaaccgttcctctacaccgccgcaatggataaagggctgacgctcgccagtatgctcaacgatgtgccgatttcccgctgggacgccggggcaggttcagactggcgtccgaaaaactccccgccgcagtacgccggaccgattcgtttacgccaggggctggggcagtcgaaaaacgtggtgatggtacgcgccatgcgcgccatgggcgtcgactatgcggcggagtatttgcaacgcttcggcttcccggcgcagaatatcgtgcataccgaatcgctggcgctgggctccgcctccttcacgccgatgcaggttgcgcgcggttatgcggtgatggcgaacggcggtttcctgatcgacccgtatttcatcagcaagattgagaacgatcagggcggcgtgatcttcgaagcgaaaccgaaaatcgcctgcccggagtgcgatatcccggtcatttacggcaatacgcagaaatctgacgtgctggaaaacaccaatgtggaagaggtcgcggtttcgcaagagcagcaaaacagcgccgtaccgatgcctgagctggaacaggcaaaccaggcgctggtcgcgcaaaacggcacgcaggaatacgcgccgcatgtgatcaatacgccgctggcgtttctgatcaaaagcgcgctgaacaccaatatctttggcgaacccggctggatgggtaccggctggcgtgcggcgcgcgaccttaaacgtcgcgatatcggcggcaaaaccggtacgaccaacagctcgaaagacgcatggttctccggctatggtcctggcgtcgtcacttccgtatggatcggctttgacgatcaccgccgtgatttaggccgcaccaccgcttccggcgcgatcaaagatcaaatctccggctatgagggcggcgcgaagagcgcgcaacctgcatgggacgcctatatgaaagccgtgctggaaggcgtgccggaacagccgctaacgccgccgccgggcatcgtcacggtgaatatcgaccgcagtaccggacaactggcgagcggcggtaacagccgtgaagagtatttcatcgaaggcacgcagccgacacaacaggcggtacacgaggtgggaaccaccattattgataatggtgaaacacacgaactgttctgatcaaaaaaggcgctccggcgccttttttattgtgtttagcggatgacggcgaacggggagacaaactttccgttggcttgatcaacgccgcgccatcaggcaattcggccctgcgctttcaaccactcgcgtaccagaaacagcgcgctgacgttgcgggcctcgttaaaatcggggtcttccagcagatccattaaatgcgccagcggccagcgtacctgcggcaatggctcaggctcgtcgccttccagcgactccggatagagatcttccgccaccacgatattcattttgctggaaaaataagagggcgccatgctgagtttttttaagaaggtcaggttatgcgcgccaaacccgacctcttctttgagctcccggttcgccgcttcaaaaacggtctcgcccgggtcgatcaatcctttcgagaagcccagctcataggattcggttcccaccgcatactcacgaataagaatcagatgctcatcaacgatcggcacaatcattaccgcctcacgggttgatggtcgcatacgttcatacacgcgacgcacgccgttgctgaactccagatccacgctttctacgttaaacagtcgggattgtgcgacggtttccactttcagaatggtgggtttttgtaatgatttgctcattgtgagaatctttgcagtgtaatctgtggtcattgtgcgacataccgcacggtttcggcaatgcgaattgccgtttatttacatttatgtaacgtaataaaaattaattcttatttcaaattaaaagtcaataggttgaaataactccaggaatttgctgatattccgtttttggtggtattgctatgatttgccttcactgggatgcgctttacaatgctcaagttcaactccacgcttgccgatagccaaccacagaaaaatgtttattggacagggtgcgactgaccacgcctgacagacttagtaagatggggaaagcatgagcaccattctgatttttatagctgctttgctggcctgctctctactggcaatatggcggttccgggtaaagtccagacgagggagcttaccgtggatcagcgcctttcaggacgcgcaaacgcgtaaactgttgcccgaagagcgcagcgcggtagaaaactatctcgataaccttagccagatccagcaagttccggggccgacaggcgccagtgctgcgcccatctcgctgacgctgaacgcggaaagcaacagtgtcgtgatactaacccactccatcacccgctacggcattaccactgacgatcctaataaatggcgctactacctcgactccgtcgaagtccatctgccgcctttctgggaacagtacatcaatgatgaaaacaacgttgagctgatcctcacggatacgctgccgctggtgatctctttaaacggccatacgctgcaagagtatatgcaagagtcgcgcggctacgcgctacagaataccgcctctacgcaggcgtcgattcgcggcgaagagagcgagcagattgagctgttgaatatccgtcaggagacccacgaagaatatgcgctcagccgcccggctggcttgcgcgaagcgttgttaatcgtcgcctcctttttgttattctttttctgcctgataacgccagacgtttttgtaccgtggatgataggcggcgcgatcctgctgctggcagccggactttgggggctttttgcgccgccgtcgaaaagcgcgctgcgggaaattcactgtctgcggggaacgccccgccgctggggactgtttggggagaataatcaggagcagattaacaatatttcgctgggcatcatcgaccttatttaccctgcccactggcaaccctacattacgcaggatcttgggcaacaaacggatattgatatttaccttgatcgccatgtcgcgcgccagggccggtttttatccctgcatgatgaagtgaaaaacttcccgttgcagcactggttacgcagcactgttattgctatcggttcgctgctggtgttgtttatgctgctgttctggatcccgctggatatgccaatcaagttcacgctatcgtggatgaaaggcgcgcaaaccattgaagcgacaacggtaaaacagcttgaaaaagctggcgtgcgggtgggcgatacgctgcacctgagcggtaaaggaatgtgtaatattcattccggcgcgacctggagcggccagtctaactcaccgtttatgccgttcgattgctcgcaaatcatctggaatgacgcgcctgcgctaccgctgccggaatcagacctggtgaataaagcgatggcgctaagccaggcggtaaatcgtcagctccatccaaaacccgaagacgactcgcgcgtaagcgcatctttacgctccgcgatccaaaaatcgggcatggtattattagatgactttggcgatattgttctgaaaaccgctgatttgtgcgcggcggaagacgagtgcgtgcgtctgaaaaatgcgctggttaatctcggtaacagtaaggactggaacgcgctggtgaaacgcgcgaacgccggcaaactggacggcgtcaacgtgctgctacgccccgtaagcgcagagtcgctggaaaatctggtcacgacctcaacggcgccgtttatttctcgcgagaccgcgcgtgccgcccagtcgctgaatagccccgctcccggcggattcctgatcgccagcgatgaaggcagcgaactggttgatcagacctggccgtcaacgccgctgtatgactatcccgcgcaggaacagtggagcgccttccagcgtctggcgcaaacgctcatgcagacgccatttagcgccgagggcattgtcaccagcgtgtataccgatgccaacggcacgcagcatatcagcctgcatcgtatccccgataaatccggctggtggcgttacctcggcaccacgctgctgatgctggcaatgatagtgagcgcggtctacaacggcattcaggcgttcaggcgttatcaacgccaccgtacccgtatggcggacatccaggaatactatgaaagctgcctcaatcccaggttaaccgtctctccggaaaatctcatctgatagcgccgccgtgcgacagggtatgctaccctgtcgcgcaaattgcgttaccctggagttccccatgcatattgatattgactggcaaaacgtggataccgttttgctggatatggacggcacgctgctcgatctcgcgttcgataactatttctggcaaaagctggtaccggaaacctacggcgcgcagcagggtatttcgccgcaggacgcgcaggaatatattcgccagcagtatcatgccgtacagcatacgctaaactggtactgtctggattactggagcgagcgtctgggtctggatatttgcgccatgacgacggcgcaagggccgcgcgccgttttgcgcgacgataccgtaccgtttctgaatgcgttaaaagccagcggaaaacgtcggattctgctcaccaatgcgcatccacataacctggcggtgaagctggagcataccggtctggcctcacaccttgatttattactttccacccacacatttggttatcccaaagaggatcagcggttatggcgcgctgtcactgaggaaacgggaataagcgcagagaaaacgctgtttatcgatgacagcgaaccgattctcgacgccgccgcccggtttggtattcgctactgtcttggcgtgacgaatcctgattccggcctggcggaaaagcactatacgcgccatccgtccctgaacgactaccgccgtctgatcccctcgctgatgtgaaggagacgccatgaaagaaaagtcctccgttgaggtcagactggataaatggctgtgggccgcgcgtttttataaaacccgcgcgatggcccgcgagatgattgaaggcggtaaggtgcattacaacggccagcgcagtaagccgagcaaaatcgtcgagctgaacgcaacccttaccctgcgtcagggaaatgacgaacggacggtgatcgttaaagccatcaccgaacagcgccgtccggccagcgaagccgtcgctctgtatgaagagacggcggaaagcgtggaaaaacgcgaaaaaatggcgcaggcgcgcaagcttaacgccctgaccatgccgcatccggacaggcgaccggacaagaaagagcgccgcgacctgttacgatttaaacacggcgacagcgaataactgtcacccgcaagagagatgattatgccgcaacatgaccaattacatcgttatctgtttgaaaactttgccgttcgcggcgagctggtaaccgtttcggaaaccttgcaacagatcctcgacaatcataactatccgcagccggtgaaaaccgtactggccgaactgctggtcgccactagcctactgaccgcgacgctgaagtttgctggtgacattacggtacagctccagggcgacgggccgttaagcctggcggtgatcaatggcaataatcagcagcagatgcgcggcgtagctcgcgttcagggcgatatccctgacaatgcggatctcaaaacgctggttggcaacggctatctggtgatcaccattacgccggaagagggtgaacgctatcagggcgtggtgggtctggaaggcgatactctggcggcgtgcctggaagattacttcctgcgctccgagcagttgccgacgcgcctgtttatccgtaccggcgatgtcgacggtaaaccggcggcaggtggaatgttgcttcaggtgatgccggcacagaacgcgcaggcggaggatttcgaccatctggctatgttgacggaaaccattaaaagcgaagagctgctgacgttaccggcaaatgacgtgctgtggcgtttgtatcacgaagaagaagtcacgctctacgatccgcaaaatgttgaattcaaatgcacctgttcacgcgaacgttgcgcgggcgcgctgaaaacattgccggatgaagaagtggacagcattctggcggaagaaggcgaaatcgatatgcactgcgattactgcggcaatcattacctgttcaatgcgatggatatcgcggagatccgtaacaacgcctctcctgccgatccacaggttcattaatcgcctttcagtcgacaacatcattgcctgatggcgctcgcttatctggcctacagcatcccgctccgtaggccggataaggcatttatgccgccatccggcaaaaagcttactcgttgtagtaatccacatccaaccgctgaccatcaacaatgatatcgcgccaggctttgggggctgagtctaaccgatgcccggcaatcgcgtgcaacagttgcgtcttagaaaacccgtccggcagtcgggcgaacgctttctgcgtccatttcccctcttttaagccgtagacctggctctcggcaacaataaagttatacagcacctgctcaggctgaccgtcgccgttaagatcctgactcaccagcacgcaggcatccggttcaaggcaggaatcgtccgaataactctgctctttgacaaacgcccaaaatgcggcatccggcttctggctaccgggcgcaatcatcaccacccgcgctaaatcgtccgccgtcggagagaccttatttctctgcaaaaacgtcatcagttcacgattgcgctttctgttctgcgtaaacgcctcgtcatcccgcaacgatttcagcgcttcctggccaggtttgccgctgtgatccagcatatacaggctgatctgatccgcagtaattttaccactatggtaacgcgccatatggctgttgacgctaatacgccagacatcaagtacaggcgaggccagcaacagcaatatcaccagcgtcaacaaagagacgctcagtatcaccttgccttgccactcaccagggtcgcgtccgcggcgtaacagaccgatcagataaccgaaggaccataccagcaagacagacaccgtcagcgcaccatacagacgatccggcgtccaaccgtattgctgaatgcgtacccataacgcccagcccgccagcagcatatatatcggggcaacgcacagcgaggcgctaatcatgccgcgtagtacgcgcggatagggtaatacgcgcttttgcggttcgttgacaatcgccacgaggagcagcagcatcagcgtcagcgtggatagcagccccgcagcggaaacacgcgcagaaatcgcctccagtccggtaaagggtaacgtcacaataaacagcaatgccagcagcgacaccactggcagtaaacccgtcgcgatcagcgtcagcagcttttgcaccgccgccacaaggcgcgactgcgtgcgggcgagaatgaccgccagcgccgtaatcaggccgatggtcacataaataaaggcttcagtttcaaagaaaagggtgctgaaaaagcggatgcccaccagcctgaatagcgcgctccagagcagaagcaccagccagaacagtccgttagcgaccaggacgataaacaatgtcagtacgttatgccataaccgcagataaaactggggataacgcgccgaaccggtttgcgaatgtaactgatattgcatccagggtaagaccagcatcgccatcaacacaagccggagaccatacagccagaggagctcggccaggcgccatttctccaccgtctcaacctgccatttcagccagccgctcattgccagcacgaccacaaagatcagccccagccagccccacagcgcgcgctgtttaaaagagaccacggtaagcaatagcattgacgacaacgctatcgtcgcaggcataccatagaacagccagtcgctattttgtggtaccagccaggccatcagcaggtagcacaagacgccctgcagcaaaccggtgagcaacatcccccagcgagtagtatgtgaaagcgctacactttccatgtcgttatccagaatgatgagaaagccgcattattgcaccatctgttcaccgccaggcgtcgtcatgcataattcagaaaaaaacgcagagaggtgaatcgatattgttaatgttggtgttacgtaactttcttacatgaatgcgattacagtcacattatgtcggtcaaaaacacttccttttaacgttttcagaacattttccacaacaaaagtaggtttcctgccataataaccgccgctgcgtgacaggagtcacagtgtttttcgtcaatcgtgattttgtccagatacgtaaatctatgagccttgtcgcggttaaccaacctcaaaaaaccttactattttcggtaatatatattggctaaggagcagtgatatgcgcgttaacaatttaaccccgcaagatctcaaggcttatggtatcaacgacgtccaggatatcgtttacaatcccagctacgacaccctttatcaggaagaacttaatcctggtctggaaggctatgagcgtggcgtgttaactaacctgggcgctgttgccgttgataccggtatttttaccggtcgttcgcctaaggataagtatattgttcgcgacgacaccacgcgtgatacgctgtggtggtccgataagggtaaaggtaaaaacgataataagccgctttcccaggaaacctggcaacacctgaaaggtctggtgacgcatcagctttctggtaaacgcttattcattgttgatgcgttctgcggcgcaaatgccgatacgcgtctttccgtgcgctttattacggaagtcgcctggcaggcccacttcgttaaaaatatgttcattcgcccaacggacgaagagctggtaggcttcaaacctgactttattgtcatgaacggcgcgaagtgcaccaacccgcagtggaaagagcaagggctgaactcggaaaacttcgtggcgttcaacctgactgaacgtattcagcttattggcggcacctggtacggcggcgaaatgaaaaaagggatgttctcggtaatgaactacctgctgccgctcaaaggtatcgcctcaatgcactgttccgccaacgtgggtgaaaaaggcgatgtcgcggtcttcttcggcctttccggtaccggaaaaaccactctctccaccgacccgaaacgtcgtctgattggcgatgatgagcacggttgggatgacgacggcgtgttcaattttgaaggcggctgctacgccaaaaccatcaaactgtcgaaagaagcggagccagaaatttatcatgcgattcgccgtgatgcgctgctggaaaacgtcaccgtgcgcgaagacggcaccgttgatttcgacgatggttccaaaaccgaaaacacccgcgtctcttacccgatctatcatatcgataacatcgttaagcccgtgtccaaagcaggtcacgccaccaaggttatcttcctgacggcggacgccttcggcgtgttgccgccggtttcccgtttaaccgctaaccagacgcagtaccacttcctgtcaggtttcaccgctaaactggccggcaccgaacgcggcgtcaccgaaccgacccccaccttctccgcctgcttcggcgccgcgttcctgacgctgcacccaacgcagtatgctgaggtgctggtgaaacgtatgcaggcagcaggcgcgcaggcttatctggttaacaccggctggaatggcaccggcaaacgtatctccatcaaagatacgcgcgcaattatcgacgccattctgaacggttctcttgataacgcggaaaccttccgtctgccgctgttcgatctggcgatcccgactgaactgccaggcgtggatacccacattctcgacccgcgtaacacctacgcgtcgccggaacaatggcaggaaaaagccaccgcgctggcgaaactgttcattgagaacttcgagaagtatacggataccccggcaggcgaagcgctggttagcgccggaccgaagctgtaaggaacaggccggatggcggctttgaacggcgtcatccggcgttgagaagaaagggagggtaatacctccctttcttatgcctcttttgtcgtcccctggacgcgagccacaggaaccggtagccaggcgcgaatcgacaatccgccacgctcgctggtgccaatctccagcatcccgttatggttatcgataatgcgctgcacaatcgccagccccagccctgtgccgctggtgctacgggcgctgtcgccacgcacaaaaggctggaacagatgtttacgctgctccggcttaatgcccggcccgtcatcttctacctgaaaccaggcgcgatgcgactcggtgccgctgctgaccttaatccagccgttgccatagcgggcagcattgaccaccatattcgccaccgcgcgcttaatcgagagcgggtgcattttcacctggatgctgcctgcctgaagcgcagtgttaatctcacgctcatagccgctttccgccgcaatcacctcgcccagcacggaattgagatccgccatctccattggcatttcctgaccggtacgcagatagtcaataaactgttcgataatggcgttacactcttcgatgtctttattgatcgactccgcgagataaccgtcttcctcgcccatcatctccgtcgccagacgaatacgggtcaacggcgtgcgcaagtcgtggctgacgcccgccatcaatagcgtacggtcatcggccaattgcttcacgccggctgccatatggttaaacgcccgggtcacagagcgcacttcagaggcgccatattcacgcagcggcggcggaataattcccttccctacctgcaaggcggcatgttcaagatccactaacggtcgattctgtatacgaataaacagccacgcgccgcctatcgccaggagcatgatcgccagcgtgtaacggaaaagcggagaaaaatcgccctgatgaatctcggtcagcggcacgcgcacccagatattgggcgacagccaggttttgagccacacgacgggcgagcttttgttgacctcaacgcgcacttccgtcgggccgcctaattgctgcgccatctggtggcttaagaattcgtagtgttgcgcccaacgcaacccggcctcttcggcggcttcgttggtgtagagagagatccccagctcgcgatagatttcccggcgaaacgcaggcggcacgactaactgcgtgccgtcctccagttgcagcttatcggtcatcagcatacggacttcgtaagccagaaccttattaaactgctggaggctcggcaaaatcgcgaagttcagcaccaccaggtaggtcgtcaccaggctgacgaacagcaaggtgacgatgagcaacagcgtgcgggcaaatgaacttcgcggtgagaagcgcattcgcctcatgctttagaaccgtccggtacaaagacgtagcccaggccccagacggtctgaatataacgcggatgtgccggatcttcttccaccatacggcgcaggcgggagatctggacgtcgatggagcgttccatcgcggaatactcgcggccacgggccagattcatcagcttatcgcgagagagcggctcgcgcggatggctgactaacgctttcagtaccgcaaactccccgctggtcagcggcatcggttcatcttcacggaacatctcgcgcgtaccgaggttcagtttaaacttaccgaacgcgataacggcctcttcctgcgacggcgcgccgggcagttcgtttgcctgacgacgtaacacggcgcgaatacgcgccaacagctcgcgcgggttaaacggtttaggaatgtagtcatcggcgccgatttccagcccgacgatacggtcaacctcttcacccttcgccgtgaccataatgatcggcattggattactttgactacgcaggcgacgacaaatcgacagaccatcttcacctggcagcattaaatccagtaccatgagatggaaagattcacgggtcagcagacgatccatctgctcagcgttagcgacgcttcgaacctggaagccctgctcggtcagataacgttccagtagcgcccgcagacgcatatcgtcatcaaccaccagaatcttataattctcttgcattgtctgtactcccaaaggttcgcaacaaatgtaagtgtgtattcttaaaaaagctcacgtgagtcaccagcaaattctggtatgaatttcaggctaaattgttacaaagcatatttaacagcagcttaaatatacaattaatcggcaaccccattatttattctgtcgggacgatcacgttataccccgtgtgcgcaatatcgacagcaaaggtaaatcaacgagatgaaaacgcccctgatcacccgcgaagggtacgaaacactcaaacaagagctcaattatctctggcgtgaagagcgcccggaggtcaccaaaaaagtgacctgggctgcgagtctgggcgaccgcagcgagaatgccgactatcagtataataaaaagcgcctgcgtgagatcgacagacgcgtcagatatctgaccaaatgcatggaaaatctcaaaatcgtggattattccccgcagcaggagggcaaagtcttcttcggcgcctgggtggaaattgaaaatgatgacggcgataggctgaagttccgcattgtcggctacgatgaaattttcggacgtaaggattacatctctatcgactcgccgatggcgcgggcgctactgaaaaaagaagtgggcgatctggcggtggtcaacacccctgtcggcgaagcaaactggtacgtcaatgcgatcgaatacgtcaaataagacaagaagaatcctaagcccccgctgatggctggcatttttgccagccaatccgtataactatcccctgatttttatcctgaagacgaagctaacccatgatgaatgattctttctgccgcattattgcgggtgaaatccaggcaaatgccggacaggttgaagctgccgttcgcctgcttgacgaagggaacaccgtgccgtttatcgcacgttatcgtaaagaaatcaccggcggtctggatgacacgcagttgcgtaacctggaaacgcgtctgggctatctgcgtgagctggaagacaggcgtcaggccatcctcaagtccatttccgaacaaggcaaactgaccgatgagctggctggcgccatcaacgctacgttaagtaagaccgagctcgaagacctctacctgccctataaacctaaacgccgcacccgtggacaaatcgccattgaagccggccttgagccgctggccgatctgctctggaacgagccgtcccacgatcctgacgtggaagcggcaaagtacattgatggcgacaaaggcgtggcggacacgaaagccgcgctcgacggcgcacgctacattctgatggagcgctttgccgaagacgccgcattgctggcgaaagtacgtgattacctgtggaagaacgcccatctggtcgccaccgtcgtgagcggcaaagaggaagaaggggcaaaattccgcgactatttcgaccatcatgagcccattgctaacgtcccgtctcaccgtgcgctggccatgttccgtggtcgtaacgaaggcattctgcaactttcgctcaatgccgacccacagtttgatgagccgccgaaagagagctactgcgagcaaatcatcatggaccatctcggcctgcggctaaataacgccccggcggatagctggcgcaaaggcgtagtgagctggacgtggcgtatcaaagtcttaatgcacctcgaaaccgaactgatgggcaccgtgcgcgaacgtgcggaagacgaagcgattaacgtgtttgcgcgtaacctgcacgacctgctgatggcagcccccgcaggcctgcgcgccacgatgggccttgatcctggcctgcgtaccggcgtaaaagtcgctgtcgttgacggcaccggcaagctggtggcgacggataccatttatccgcataccggtcaggcggccaaagcggctaccgtgatcgccgcgctgtgcgaaaaataccacgtcgaactggtcgcgattggcaacggtacggcctcgcgtgaaaccgaacgcttctatctcgacgtacaaaaacagttcccgaacgtgacggcgcagaaagtgatcgtcagcgaagcgggggcgtccgtgtattccgcttctgagctggcggcgcaggagtttccggatctcgacgtctccctgcgcggcgcggtctctatcgcgcgtcgtctacaggatccgctggcggaactggtgaaaatcgatccgaaatccatcggcgtcggccaatatcaacacgatgtcagccagacccagttggcccgtaaactggatgcggtggtcgaagactgcgtaaacgccgtcggcgtcgatttgaataccgcctccgtgccgctgctgacccgcgtcgcgggcttaacgcgcatgatggcgcaaaacatcgtcgcctggcgcgatgagaacggtcagttccagaaccgccagcaactgttgaaggtgagccgtctggggccgaaagcgtttgagcagtgcgcgggcttcctgcgtattaaccacggcgataacccgctggatgcgtccaccgtccacccggaagcctatccggttgtcgaacgcattctggcggcgacgcagcaagcgctaaaagatctgatgggcaacagcaacgaattgcgccacctcaaggccgctgattttaccgacgataaattcggcgtgccgaccgtgagcgatatcatcaaagagctggaaaaaccgggccgcgacccgcgtcctgaatttaaaaccgcgcaattcgccgatggcgttgaaaccatgaacgacctgctaccggggatgattctggaaggggcggtcactaacgtcaccaatttcggcgcgtttgtcgatatcggcgttcatcaggatggcctggtccacatctcttccctgtcgactaagttcgtcgacgatccacacaccgtggtaaaagctggcgacatcgtgaaggtgaaagtgctggaagtggatctgcaacgtaagcgtattgcgctgacgatgcgtctggacgaacagcccggcgaaaccgccgctcgccgcggcggcggcgccgatcgcgctcagggcaaccgcccggcatcaaaagcggcgaaaccgcgcggtcgtgacgcccagccagccggtaacagcgccatgatggacgcgctggcagccgcaatgggaaaaaaacgctaatcgggtaatacgcaggccgggttacttcttatccggcctgcgattttgcaatacgtccaaccctttcttttttaattaacaattaaatcttacccattagaatctgttaattaatttccttctgctatccgcactattaattatcactttattaacagatgaaaccttaattaaacattaaaaacggtgaatatttgcacattagaggtatttgcaaaaagacaaataaatgttgagccatatcaacatcggcgcaaattatcgcttatttgtacattccgtcacattttaatcgttgaagatagaaaccattctcattatcattgtgttgttgattatttactctttccttcgttggctaaacatcgggtctcctgccgcccccctgagcgccgcatgaggtatacatccagttagtaagaaacaagtaggtcgtatgcaattcactcctgacactgcgtggaaaatcaccggctttgcgcgtgaaatcagcccggcgtatcgtcaaaaactgctttcgctcggcatgttgcccggctcttcatttaatgtcgtccgcgtcgcgcccttaggcgatccgatccatatcgaaacacgacgcgtgagtctggttttgcgtaaaaaggatttggcgttaatagaagtggaagcggtttcctgttaatacagtgagtctataaaaatgaaaaaattaaccattggtttaattggtaatcctaattccggcaagaccaccttatttaaccaactcaccggcgcgcgtcagcgcgtggggaactgggcgggcgtcaccgtcgagcgtaaagagggccagttcgcgacaactgaccaccaggtcacgctggtagatttacccggcacctattctctgacgaccatctcgtcacaaacctctctcgacgaacagatcgcctgccactacatcctgagcggcgacgccgacctgttgataaacgttgtggacgcctccaatctggagcgcaacctctatttgacgctgcaactgctggagctgggtattccctgtattgtcgcgctcaacatgctggatatcgccgaaaaacagcaggttcgtattgatgtcgacgctctgtccacgcgtctgggttgccctgtcgtaccgctggtatcgactcgcggtcgcggtatcgaggcgctgaaactggccattgatcgtcacaacgctaacgacaacgtcgaactggtgcattatgctcagccgctgctgcgcgaagcggatttcctggccgacgcgatggcccaggagatgcctttacaacagcgccgctggctgggtctgcaaatgctggagggcgatatctacagccgggcttacgcaggcgaggcggcgcaaaacctggatacctccctggcccgtctgaaggacgaaatggacgacccggcgctgcatatcgccgacgcccgttaccagtgtatcgccgctatttgcgacgtggtcagcaataccctgacagccgaacccagccgcttcaccagggcggtcgataaaattatcctgaaccgcttcctcggcttaccgatttttttgttcgtgatgtacctgatgttcctgctcgccattaacatcggcggcgcgttgcaacccctgtttgatgccggttccgtcgccatctttattcatggcattcaatggattggctacacgctgcacttcccggattggttaaccatcttcctggcgcaaggtcttggcggcgggatcaataccgtcctgccgctggtgccgcaaatcgggatgatgtacctgttcctctccttccttgaagactccggttatatggcgcgcgcggccttcgtcatggatcgcctgatgcaggcgctgggactaccgggtaaatccttcgtgccgctgattgtcggcttcggctgtaatgtaccttccgtgatgggcgcccgcacgcttgacgctccgcgcgaacgcctgatgaccatcatgatggcgccgtttatgtcctgtggcgcgcgcctggcgattttcgccgtctttgccgccgccttcttcgggcaaaacggcgcgctggcggtcttctcgctgtacgtgctgggtattgtcatggcggtattaaccggcctgatgctgaagcataccattatgcgcggcgaagcttctccgtttgtgatggagctgccggtttaccacgtcccgcatatcaagagcctgatcatccagacctggcaacgcctgaaaggttttgtactacgcgccggtaaagtcattatcatcgtgagtattttcctgagcgcgtttaacagtttctcgctgagcggcaaaatcgtcgataacattaatgactccgccctcgcctctgtaagccgggtcatcacgccagtctttaaaccgatcggcgtccatgaggataactggcaagcgaccgtgggtctgtttacgggcgccatggcgaaagaagttgtcgtcggtacgctgaacacgctctacaccgccgaaaatattcaggacgaagcgtttaatcctgccgactttcacctcggcgatgaactgctgggcgcggttgacgatacctggcaaagcctgaaagacacctttagcctgagcgtactggctaatccgatcgaagcaagtaaaggcgacggcgaaatggcgaccggcgcgatgggcgtgatggatcaaaaattcggcagcgccgcggcggcgtacagttacctgattttcgtcctgctttacgtaccgtgtatctcggtaatgggcgctatcgcccgcgagtccagccgcggctggatgggcttctccatcctgtgggggctgaatatcgcctattcgctcgccacgctgttctaccaggttaccagcttcagtcaacacccgacatacagcctgatctgtattctggcagtgatcgtctttaacgttgtggtgttaagcctgttacgccgcgcccgcagccgtgtagacattgaactgctggcaacccgcaaaaacgtcagttcctgttgttcgggcactgcgggcaattgtcactaagggatgtaaaaaatggcttcattgatacaggttcgcgatctactggcgctgcgggggcgtatggaggcaacgcaaatcagccatacgctgcacgctccgcagcccatgatcgacgccatgctgaatcaactggagatcatgggtaaagcggtacgtatcccggaagaaccggacggctgcctttcaggcagctgtaaaagttgtccggaaggtaaagcctgcctgcgcgaatggtgggccttgcgttaaccttcgtcgggtagcgacgtaacgcgtcttatccggcctttatcccgcgttatgttgcccggtacgcgtcacgctgccgggcaattttgcgtcatgccttccacaaagatgaaagcgttaccgccgtgcgcatttatctccccacgcgcctcgcaagcgcactaatcctctactgcaatcagcccggtctgcgcgtagtgtcacgccattgaacttcaccgatgacggatcgatatggcgacctcaacaacatccacgccgcatgacgcggtattcaaacagtttttatgccaccccgatactgcacgggattttttggaaatccatctcccgtcgacattacgtcaaatctgtaatctgaatacgttacggctggagtccggtagctttattgaagaggatttacgcccccattattccgatattctttggtcgctggaaacaagtgaaggtgaaggttacatttacgtggttattgaacatcagagtacgccggacgcgcatatggcatttcggctgatgcgttacgcaatggctgcaatgcaacggcacctggaggccgggcataagacgttgccgttagtggtgccaatgctgttttatcacggaaaccgcagcccgtatccgttctcattatgctggctggatgaatttgccgacccggtgatggcgcgtaagctatacgccaccgcctttcctctggtcgatattacggtcgtgccggacgacgagattatgcgacaccgacgggtcgcgctgctggaactcatacaaaaacacatccgccagcgtgatctgatggggcttgtcgaacagctggtcgccctgctggttaagggatacgctaatgacacccagcttcaaagtttgtttaattacatgatgcacactggcgacgccgcgcgcttcaatacgtttatccgccaggtggctatgcgtatcccacagcataaggagaagatcatgactatcgcagacagattacgtcaggaaggacatcgtaacgggttacagcaaggcaagcaggaaggccaacggctcgccgcattgcgcattgcccgctccatgctaaacgatggtttcgatcgcgataccgtgcttagggttaccgggctggcgcctgccgatctggcgtctgaaaaccattaatctggcagaatggtccgggcccggcaacgccctggttacagcgatgattttagcgtcatcagcgcctgacaaaacgccgccggatgcgagataaacggcgcatgggccgccttcgccattatctgtgatgtactgtgcggccataacgtatcgagcaaaggcacgattttacgcggcaccagaccgtccagataaccatacaaacgcaaaaacggcatgttcacatttttaagcgcttctcgtagatcgaccgtttttaagatttccagtccgccattgagcacctctacatccggcataggctgcgccagcaccacgctttttaaggtgcgggcatcctgacgcgccgtctccgtccctaacgtttgcagcgccagaaaacgctccaccgtgcgctgaaaatcgtcgctaagctgctgctggaatccgccgaggatttctggttttattcccggccacccctcacgcgcgctaaagcatggcgaagaggcgacagtcaccagcgcctggacgcgttcagggtgggtgagcgccatctgactcgccaccaggccacccaggctccagccaagccagatagcctggtccggcgcgtttttcgctacctgcgccgtcatctcttcaagcgtcatggcgccaaaccccgagctgcgaccatagcccggcaagtcgaccagatgcagcgtaaaatgcgagccgagttcctcgcgaatgcaatgccatacctccgcgttcaatccccatccgtgcagcagcacaagatgacaatttccctcgccgtaggtctgccaccagatgtcattcatcagttactgttctcttttgtctaacaaggatgcacctatgctaacagtaccgggattatgctggctatgccgaatgccgttggcgttaagccactgggggatttgttccgtatgcgcgcgcgctgttcgtcagcgcgtcagcctgtgtccgcaatgcggattacctgccgcgcatccttcgctcccctgcggtcgctgcctgcaaaaacctccgccctggcagcgtctggtgagcgtcagtgactatacaccgcccttgagtttactggtgcatcagcttaaatttacccgccgcagcgaaattgccgccgcactggcgcgtctactgttgcaggaagtcctcatggcgcgccgcagcactggcttgcagcttcccgacagaatcgtcagcgttccgctctggtcgcgccgacactggcggcggggatttaaccaaagcgatctgttatgccaaccgttagcgcactggctgggctgcgcgtgggacagccagaccatcacgcgggtacgggcgaccgcaacacaacatcatctcagcgccaggttacgtaagcgcaatttgaaaaacgcgtttcgccttgaattgccggtacagggtctccatatggttattgtggatgatgtcgtcactaccggaagtaccgtcgcggaaatcgcgcaactgcttttgcgcaacggcgcagcgactgtccaggtatggtgcctgtgtcgaaccttgtagagcctcgatgatgggcgtattataaccaactaaaatagtcaactattaggccattactatgatccgtatttccgatgctgcacaagcgcactttgccaaactgctggcaaatcaggaagaagggacgcaaatccgcgtatttgtcattaatcccggcactcctaacgcagagtgcggcgtttcttattgtccgcccgacgccgtagaagccaccgatactgcactgaaatttgacctgttgaccgcttatgtcgacgagctgagcgcgccctatctggaagacgcggaaattgatttcgtgaccgaccagctaggttctcaactcacattgaaagcgccaaacgcgaagatgcgcaaagtggccgatgacgcgccgctgatggagcgcgtggaatatgctctgcaatcgcagattaacccgcagttggcgggccacggcggtcgcgtctcgctgatggaaattaccgatgaaggctatgcaattctgcagtttggcggcggttgtaacggttgctcgatggttgacgtcacgctgaaagaagggatcgagaaacagttgctgaatgaattcccggaactgaaaggggttcgcgatctgaccgaacaccagcgcggcgagcactcatactactaagattttccccgcatccatgcccgatggcgcttgcgcctgtcgggccttgtcagccccaccgtaggccgaataaggcgtctacgccgccatccggcgctatcaaccacatctcataacaatggcccttcttctttcgccgataacatgacctgtgtctcataatttaaattttgcctgccagggtcattttcaacacccatatgttacccgtatcattcttatgggcacctaacatccatataacatctgactacgctcattcgtttcaacggtaatcagtattggtgctattgcgactctgttcccgtcgggaacaacaggaatttgtcgtcgaaacaatgacgttacccataacaaagtaaaggccaggtaaatcatgccattagtcatcgttgctatcggtgttatcttgttacttcttctgatgatccgcttcaaaatgaacggatttatcgcccttgtcctggtagcgctcgctgtcgggttgatgcagggaatgcctctggataaagtcatcggctccatcaaagccggtgtcggtggtacgcttggcagtctggccctgattatggggttcggcgccatgctgggcaaaatgcttgccgactgcggcggcgctcaacgtatcgccactaccctgatcgcgaaatttggtaaaaagcatattcagtgggccgtagtgttaaccggctttaccgtcggcttcgctctgttctatgaagtgggcttcgttctgatgctgccgctggtattcaccattgccgcagcggcgaatatcccgttactgtacgtcggcgtgccgatggccgcggcgctctccgtcacacacggcttcctgccgccgcacccgggtccaaccgcaatcgccacgattttccatgccgatatgggtaagacgctgctgtttggtacgattctggcgatcccgaccgtgatccttgccggaccggtttacgcccgtttcctgaaaggcatcgataagccgatcccagaaggcctgtacagcgcgaaaacttttacggaagaagagatgccgggctttggcgtcagcgtctggacgtcgctggttccggttattctgatggcgatgcgtgcgattgccgagatgattctgccaaaaggccacgctttcctgcccgttgccgagttcctgggcgacccggtaatggctacgttaattgccgtactgattgcgatgttcacctttggcctgaaccgcgggcgttccatggatcagattaacgatacgctggtctcttccatcaaaattatcgccatgatgctgctgatcatcggcggcggcggcgcattcaagcaggtgctggtcgatagcggcgtggataaatacatcgcttcaatgatgcatgaaaccaatgtctctccgctgttgatggcgtggtctatcgcggcggttctgcgtatcgcgctgggctctgcgactgtcgcggcgattaccgcaggcggcattgcggcgccgctgatcgccactaccggcgttagccctgaactgatggttatcgcggtcggttccgggagcgtgattttctctcacgtcaacgacccgggcttctggctgttcaaagagtatttcaatttgactatcggcgagaccattaaatcctggtcgatgctggaaacgatcatctccgtctgcggcctgatcggctgtctgctgttgggtatggtggtttaagcgaggcggcttgtaggccggataaggcagcaatgtgcgccaggattgcctgatggcgctgcgcttatcaggcctacgtgctctcaacataataaagccggggaaatccccggctttattatttcttcttcgcggccgcttttcggcgtttatccaaatccttaatcagcttgtttacgccctcatcggcaaacatctgctccagcgtggcagtgagcttccgtcgccagtttttatactgatcgctggtgcccggtacgttaaccggatcggccatatccagccagtcctccggctgaagccccaacagaccgctgttactgtcggctatgtagcgctgaagcccgcgatttagcgttggcgtcatcgacattaacgatgccttatgcccggcgcgttttggcagacaaccatatttatgcagcgcgtccaatagcccctgtttcgcccgctcgcgatcctcatacagcccgcgcagaatcacttcatccggataaagccccaaagctttacccaacgtcaggtcaccgcattcccaatagccgcgcagcgtggggagatcgtgcgtcgaggcgacagccatcgattgttgcggatatgcgcccggcgcgcggaagtttttctcaaggtcattttcaaaccacagcactttataagaatagaccccgctatcgcgcagcttgccgacaatctcaactggcaccgtccccagatcttcgcctatcaccatacagcggtgacgttggctctccagcgccagaatagaaagcaaatcatctaccggataatggacgtaagccccctgatccgctgtttcgccatacggtatccaccacaggcgcagcaacgacatgacatggtcaatgcgcaacgcgccgcagttttgcatattggcgcgcagcaggtcgataaagggctcatacgcccgggcgacaatgatatgcgggtccatcggcggcagcccccagttctgaccgagcgggccgaggatatccggcggcgcgccgacagatgctttcaggcagtacagctcccggtcgcaccaggtttccgcgccgccttccgctacgccaaccgccagatcgcggtacagaccaatcggtagtttaaaactctggcaggtatcccagcaggcggcgaattggcgccaggccagccactgaagccagaggtaaaactccacctcttcgcggtgcgcttcacagaattgttttaccgcgggatactctaccgactggtacgcctccggccaggctggccagccccagcgctgctcatcctcttttacctgatacgcatgcagcgcgtcgaatgccgcctgccagtaaaggctctcgccttcgcgggcgataaagtgacgaaactccgccatttgcgcatcgtcgcgagcggcaaaccgcgtccacgccatccgcagcgccgtgattttcagcgcggtaacggtagcgtaatccacccattgcgcatcgcgcgcctgtcgcagcttttgctgtgtggcgggcatttgccaccatgcctgcgcctcttcgctcaggcggaaatcttcgacggcgttgacgtcgatatatatcacgttcagccagcgacgagacgaggggctgtagggactggcgctctccggattcgccggataaagcgcgtggatcggattcaggccgataaacgcgccgccgcgtgtcgccacgtcgaccagcatcgacttcaaatcgccgaaatcgccaataccccagtttttttctgaacgcagagtataaagctggacgcaggccccccacagttttttcccttccagcagcgcctgcggctcatagcatcgcggcggggcgacgataatacggcagtgcgtacgctgttcatcctgggtcaacgtcagggtgtggtagccctccggcaatgtagccggaaggttaagttttttaccgcccgtcacgcgccctttgtaatgcacgccctcttccgtagtcagcagccaggcaaactcaccgcgcccctctaccggcaacgccatttttttacccgcggtataaaccttcacattcggcacgaccgcctgtggtcctgttgtcgtgccgtgcatcgccgccagcaaacgtctcttggtttcagcgccaatagactgcggtttgccatgagcattgatgtaactggggctgatccccgccgccagcgcggcactatcgagacgtttattttccatcgcgctcccttagcgttttgcctgccagatacgggcctgataatcgcgaatagagcgatcggaactgaacataccgcagcgcgcggtattgaggatcgcggcgcgcgtccacgcttcctggtcacgatacagcgcatccacctgcttttgcgcctcgacataagcggcgaagtccgccatgaccaggtacggatcgcccccctgtttgccgaggctatgcagcatctggtcaaaggcatgtttatcgccatcgctgtattgaccgctttccagctcttttagcaccgcatccagcactttgtcttttttacgccatttcaccggatcgtagcctttggctttgagcgccttgacctcttccacagtatggccaaagataaagatattctcttcacccaccttctcagcgatttcaacgttagcgccgtccagcgttcccacagtcaacgccccgttcagcgccagtttcatgttgccggtgccggacgcctctttcccggcggtagaaatttgctcggaaatatccgccgccggaatgagcatttccgccgccgagacgcagtaatccggcaggaaaaccaccttcagcttatcacccaccgccgggtcgttattaatggcttccgcaaccttattgatagcaaaaatgatgttcttcgccaggtaatagcccggcgccgccttcgcgccaaacaggaatacgcgcggtacgcgatcagcctgcgggttttcgcggatctctttgtacagcgccagaatatgcaacagattcagatgctgacgcttgtactcgtgcaggcgtttgatctgaatatcaaaaatcgcgttgcttgaaatctcaatcccggtacgggccttgatgaatttcaccagccgttctttgttcgcccgtttgatgtcgcgatactgctgacggaatttggcgtcgtcagcgtatttttcgaggttgatcaactggtcgagatcgttagcccactcttttttcagcgttttatccagcaacgccgcaagctgcggattgcactgtttaatccagcgacgcggtgtaatgccgttggtgacattgtggaatttgttcggccaaagctggtgatattccgggaacagatctttcaccaccagatcggagtgcagcgccgccacaccgttcaccgcaaagccgctgaccacgcacatattggccatgcgcacctgacggtcatgcactaccgccagttttgcccatacctgcttatcgccaggccaggtgttatcgaccagcgtcttaaagcgatcgttaatctgcttgataatctgcatatgacgcggcaacagcgctttcaccagcttctcatcccagcactccagcgcttctggcatcagggtgtggttggtgtaggcgaaggttttgctggtgatagcccaggcgtcatcccagctcagttggtgctcgtcaatcagcacgcgcagcagttccggaatggcgatggtcgggtgagtatcgttcaattgaatgacctcgtaatccgccagctcatgcagtttgcgtccggccagatgatggcgacgcagaatatccgctaccgagcaggcgcactggaagtattgctgcatcaggcgcagttttttgcccgccgtgtggttatcgttgggataaagcaccttcgtcagtttttccgcatcgataccctgctgttccgcccgcaggaaagcgccgtcgttgaatttggtcagatcaaacggatgcgcgtgggtcgcctgccacaaacgcagcggttgcgcgacgccgttacgatagcctaacaccggcagatcccaggcctggcctgtaatcacaaaacctggctcccagcgcccttctttggtgactttaccgccgatcccaacctggacgtccagcgcctcgttgtggcggaaccacggatagctgccgcgatgccagtcatccggcgcttccatctgcttgccctcaacaaatgactgacggaacagcccatactggtagttcagaccatagcccgtagcggactgcccgacggtggccatcgaatcgaggaagcaggcggccagacgtcccagaccaccgttgccgagcgccggatcgacttcctcttccagcagatcggtcagattaatatcgtgcgctttcagtacatcgctaacgtcctggtaccatcccagatttaacaggttatttcccgtcaggcggccaatcaaaaattccatcgaaatgtagttcacatgacgctggcctttcgtcggctgcgctaccggttgcgcgctcagtaattccgccagcgcgccgctaacggcctgccaccactgacgaggcgtcatgtcggacgccgacagtaaaccgaaacgctgccactgacgcgtcagggcggcctggaattgatctttattgaaggttggctgtgacataggaaatccgtcctcgggtaataaaacaacgttatcgctagtttgccaggctcgatgttgaccttcctcctcccggcaatgattagggagggaggaggagcggggatgagcataaaagtgtgatcgccgccacttacccctgtataaacgcgccgattcctgtcaacgacacccagtgttacgcataatcaaatgaataaacagaaataacagtaaatcgcgaaggggtattttcgaagattatatgaacgccgaaatagtttcttacctgaaatattcagcagcgggaggttcactaacttaacataattaattaaacgcctggtatcgccattgtgttaaatccggatgatgtccaggacattatttacaataacggaaatatgacctcagcccagctctgacgctcgtttcaaccgcgccgaatacttttttaataccgttatttagaattgtgacagagtgcaaattcagacacataaaaagtctgcttagcttgcattaaaatgctttctggccgaccttatatctattaattacgaagcgcaaaaaaaatcgcagttccccccatttcccacagtgaagtgattgctatgttgattccgtctaaattaagtcgtccggttcgtctcgaccataccgtggttcgtgagcggctgttggctaaactttccggcgcgaacaatttcaggctcgccctggtaaccagtcctgctggctatgggaaaaccacgcttgtctcacagtgggcggcgggcaaaaatgaattaggctggtactctctcgacgaaggcgataaccagcaagagcgattcgccagttacttaattgccgctatccaacaggccactggcggacactgctcgaccagcgaagcgatggcgcaaaaacgtcagtacgccagcctgacgtctctcttcgcacagctctttattgaactggcgcagtggcatcgcccgctttatctggtgattgacgactaccatttgattaccaatccggtgattcacgacgcgatgcgctttttcttacggcatcagccggaaaatttcaccctggtggtattatcgcgtaatttgccgcaactgggcatcgctaacctgcgcgtgcgcgatcagctgttggaaatcggcagccagcagttggcttttaaccatcaggaagcaaagcaattttttgaccgtcgtctttcgtcgcccattgaagccgctgagagcagccgcatgtgcgacgatgtggcaggttgggccactgcgctacagttgatcgccctctccgcgcgccagaaccatacctctgcgcatcactccgcccgccgtcttgccgggattaatgccagccacctttctgattatctggtggacgaagtactggataacgtggatgtcagcacccgacattttttacttaaaagcgcgatcttacgctcaatgaatgacgcgttgattgtgcgcgtgaccggcgaagaaaacggccagatgcggctggaggagattgagcgccaggggttattcctgcaacgcatggacgacacgggcgaatggttcagctatcacccgttgtttggtagctttctgcgccagcgttgccagtgggaactggcggcggaactgccggagatccaccgtgcggccgcggaaagctggatggaacaaggttttcccagcgaagctatacatcatgcgctggcggcgggtgacgcgcaaatgctgcgcgatatcctgcttaaccatgcgtgggggctgtttaatcacagtgaactggcgctgctggaagagtcattaaaagcgctgccgtgggaaagcctgctggaaaatccgcggctggtgttgttacaggcctggctgatgcaaagccaacaccgctacagcgaagtgaatacgctgctggcgcgcgccgagcaagagatcaaaggggtcatggacggcacactgcatgctgaatttaacgcgctgcgcgcccaggtcgccatcaacgacggcaatccggaagaggctgagcggctggcgaaactggcgctggatgagcttcctctcgcctggttttatagccgtattgtcgcgacctccgttcacggtgaagtgctgcactgtaaaggcgatctcagccagtctttatcgctgatgcagcaaaccgaacaaatggcgcgtcatcatgacgtctggcattacgcgctgtggagcttaattcaacaaagcgaaattcagttcgcccagggattcctgcaggccgcatgggaaacgcaggagagagccttccagttgatcaaagagcaacatctggaacaactgccgatgcatgagtttctggtacgtatccgcgcgcaattgctgtgggcgtgggcgcgccttgacgaagcggaggcctcggcgcgcagcggtatcgctgtgctgtccaccttccagccgcaacaacagttgcagtgcctgacgttactggtgcagtgctcgctggcgcgcggcgatctggataatgcccgtagtcagcttaaccgactggaaaatttattaggcaatggccgttatcactgcgactggatctctaacgccgataaggtgcgtgtcatttactggcagttaaccggcgacaaaaaatccgccgccaactggttacgtcatacgcccaaaccggcgtttgccaataaccattttctgcaagggcaatggcggaatatcgcccgcgcgcagatcctgctgggcgaattcgagcctgcggaaatcgtgctggaagagttaaatgagaatgcccgtagcctgcgcttaatgagcgatttaaactgcaatctgctgttactcaatcagctttactggcaatccgggcggaaaaacgacgcccagcgcgtattgcttgatgccttacagctcgccaaccgcaccggatttatcagccattttgtgattgaaggcgaagccatggcgcaacaattgcgtcagcttatccagctcaatacgctgccggagatggagcagcatcgcgcgcagcgcatcctgcgagagattaaccaacatcaccgacataaattcgcccattttgacgaaggcttcgtcgagcgcctgcttaaccatccggatgtcccggagcttattcgcaccagcccgctcacccagcgtgaatggcaggtgttagggcttatctattccggttacagcaacgaacagattgccggcgaactggcggtggccgcgaccaccattaagacgcatatccgcaacctctaccagaaactcggcgtcgcgcaccgtcaggacgcggtacagcacgcgcagcagttgctgaagatgatggggtacggggtttgaggcaaaacaggcaacgtcctggtgtgtaaatttgtttaatcataaaacctgaaagcaccggttaacatatgggcaaaaacggcgcttttaaaataaatcggcatgcgttcctgttcgttcaaatcgcaggcattcatccgttatcttataaataagaatccagtcaggctcaatatgggcatcccggtatccgctatatgaaccttgtaacgggtgatctttataaatggcaggaaggggaaaagggtggtgaatcagaagcgtcataagtgttttaagtttgccgacatccttatgacgcttttgtgcccgttttacatctttctggaactgtcccgaatattcaatttccctttgccccatagtcagatccctaactggtcaaacaaatcatcagcatctttggctttatgaatatcaacgccagcttcgctattttctatcgttcgggacgttaactcattgggtatgcgcaaatcaaaaggcaatgccttttcacgcgcaactttagtcagtgtaatccgtatcaaatcagaaatggttaaccccatttcagccaggacatctgccgcctggtccttcagcgtttcgtcgatacgggcacgaacaagcgcatttgcagccatcgattagtctcctgtactgtgtctctatacagttcaaattgtagctcaactgagacacacatacaaaccgggcccggatgtttgccttgcaatgctcgtaaagatgacttagtcgcttacccggacaagatagccactttcggttgcttcacaggaaaatctgaccggcaaaaaccgttccaccaccgcaatattggtaagcaagtgagcggaggcccgtgccacggtaaacgcgccctcgcccgccagcgccagcggtaaaatcagctggtcggccagatgctctcccaccgccgccgggcttgcgagatagcgccgcgcttcatgcgcaacctggttagctaccgcttccgcgctggtgccttttacgccgaacgcggcgaacagttcggtcagttgttcgctttgaatcatcagcgacagcgcgttgcccggcccgcagccgccttccagcgcaacgacgtttttctccgcctgcgggaagtgggcttccagcgttgcgacttcacgttcgccaacgtggtaaggaaccgccgccagcaaagcttcagcggtggtgcgcagcgtctcgccgcgcgatatcagcgtcagaccgcgtaaagacgctgccggttcgacgaccgttgccgccgcgccgccgcctgccggataaaagccgtgttttatcagcgtggtgcgctggctgatgcccatcctcgccaacagcggttcccagacgcggcagataaaatcagcgctgggcgcggcctgattatgcgtcccgccgtgaacctccacgcgggatgaaccgtcagcaaaccacagcgcgggcaggacggtttgcagcaccagcatacaactgcccgcgctgccaatcgcaaaacggtactcgccgccgcgaatcggccccggcgtaaaacgcaactgttgcgagcccagctcgtcgccgttcacctgcgcgccgcagatttccgttgccgctcgcaccgccgttaaatgctggcgtagcagccccggtttagcgcgcccggcgcggatgccgctcatttcaaacggctggccggttatcattgataaactcagcgccgagcgcaaaatctgcccgccgccctctccctgtgcgccatccagcgcgatgatccttgccattttctatcctttaacgcacaccacctgccgcagggcgtacatgatttcaaccaggtcggactgcgccgccatcaccgcatcaatatctttatacgccattgggatctcgtcgatcacgtccgcatctttacggcattcgacatgcgcggtggcacgaatttgatcgtcaacgctaaacagtttcttcgctttcgttcggctcatcacacgtccggcgccgtggctgcacgaacagaacgactcttcgttacccagcccgcgcacgataaagcttttcgcccccatcgaaccgggaatgataccgaactcaccgcgccgcgccgaaacagcccctttacgcgtcacatagatctcttcgccaaagtgctgctctttttgcacatagttatggtggcagttgatctcgtccatatcgagggcgatcggtttttccacgcagcgctggagcgccgccagcgcgttttccatcatcgcctcgcggttcaggctggcgaattgttgtgcccagtgtaccgctttcaggtaatcgtcaaaatattcgcttccttcattaaaatacgccagatcgcgggacggcagcgtttctaactgctcctgcatttcttgctgcgccaggccgataaaataggtgccgatggcgttaccgatcccgcgcgaaccggagtgcagcatgatccatacccgatcggtttcatccagacagatctcaataaagtggttaccggttcccaacgttcccaggtgcttatagttattggtattcaaaaagcgcggatatttttgcgttaaccactgatatcccgcttccagttgcgcccatttttcattaacgttggcgggcgggtttccccatgcgcccacatcgcgatgcccgcgtccggtggtacgcccgtgaggcacagcggcctctatggcgctacgcagatccgccagattttccggcagatcggccgccgttaagctggtacgcagcgcgttcattccacaaccgatatccacgcccaccgccgccggaataatcgcccctttcgtcgggatcacgctaccgatggtcgatcctttccccaaatgcacatccggcataacggcaatatgtttgaaaataaacggcattttcgccgtattgatcagctgctgacgggcatcgtcttctaccggtacgcctttggtccacatttttaccggtgcgttctgggtggtcattaattcgtaattcatcatttttttctcgttttaatcattagggtggcgacaagtttatgtgaatacaccgctctaccattgagctacagagccgggctctgacgggtctcgaacccgcaacaaatgtagatccacaggcattcgccaaaatagggtggcacgacaagttaaggtgaatcacccgctctaccgttgagctacagggctaagccccggcagggttcgaacctgcgtctggccatacaaggtgtagatccaccagcatttgtgccttcagcgttgcgcgacaaattcatagccgggatgatacgcatcgggaaagatgtaatcccggccagcattcgcgccgcgctgaatactctttacaacgtcacggcttcaatctcttccagccagtgcgcgctgccatagtgaccgttaacaaagttatctatcaccgtaaacacctcgtcgctgaagccgccgacgttcaaaatatcgcttcgttccgccgcctgggtggtgccgtaaggcagcagatcgatacacaccaggcgcgcctgcgggttgcgctttttcagttcgatccagcattccatggtggccgttgagccatggcgcgatttatcaacccacgattcgttatccgacaccataatcaccagatccacccgcgcccgctcgttcaacaacctacgcagcggcgcggagcagttggtgccgccgccgccaaccgccgccagcttttgcgcgttgtgcatgaccgactggcgcgcatcaagccgcacgtcgaccacatcgcattcaaacggcagcacgcgggcctgcggatgattacgcagcacggcggcggcgatcagcccggcaacgtccacgcagcggatcttactggtctcccccttgcgatagccggttatcgacgacttcatcgaccccgacacgtccgggcagaccaccacattgccgcgaaacggcggaatgttctccagcgcgtactccatcgcctgcgctaaagcctcgcgaataacctgcggcacgccgctttgcagattgctccacgccgacagcaactgataaggataaacccaggactggcgcacctgcgccctgtccgccagccgctgcgccacgctggcggcaagcgttgcattctcaaacacgtcatgacgcgccagcgtattcaaattcatccgtaacgtttgccaactcatccgctgcgccagttgcgcccactgttcgcgactcagcggcgcgttggtcagtagtaaaaacgacacatcgggtaaggccgcgcccatgtcgccttcacgaaacgccagcagcgcgcgcgttttttccggcagctgcgccttatcgcacggcttaccaatcagccaggcgaagaaggcttcctgccacgccgcctgcggccgtgggtgcaccattttgacgatatccgccagcgacggcgcattgcccaccgatgcctgcaataagcgctcttcgctggcgttctgcaaccaacgctgcaccagcttctttggccgcgtccccagcgagcgccgcccggtcacgccgctgcgcaacatttgcacaaagttacgcagcatccggccattgttgatcacccgcgtaaatactaccggcagcagcgccgaaccacgcgccgccagaatggcggtcaacagcgcgggcatatccttcatcatcccgcgttcgcggccataaatcgccagttgcgctaaaaacagatcgtcgagatctttcgccgtcgccagaacatcatttagctgcgcctggccgctggcataaaaagtctcgttcatgcagccggtcatcaccatttgcgccagtttatggcgcggggtgaaggcaaaggccgctgcgccttgctgattgctggcgttggccagcggcgcgtcccttaacagcgaacggaacaaaagtggattagccatttgtttttcccatttccgttattctccatgccatggttattgcaaccagcgtgccagaaaataaattattttttaatctattgatttttaattgatttatttctttagcgttcaagtgaaagaaaaatgcctgcacggtagtcattaaaaagcgataaaattatctcgtcttttagaaggaaatctaagatgcgaaaaacggtggcctttggttttgtcggtacggtactcgactatgcaggacgcggcagtcaacgttgggaaaaatggcgccctactttgtgtctgtgccagcaggagacgctggtcgttcaccgcctggaactgctgtacgatgcccgctctcgctcgctgtttgaaggattaaagaaggatatcgccagcgtctcgccggaaacggaagtcgtcggcgtagaaatcgcgatccgcaacccgtgggacttcgaagaggtttacgcctgcctgcacgatttcgcccgcagccatacctttcatcccgaagatgaagactatctgattcacatcaccaccggcacccacgtcgcgcagatctgctggttcctgctggcggaggcgcgctatcttccggcgcgattagcgcagacctcgccgccgcgcaaaaaagataaaccgcatagcacgggcgacgtgacgattattgacctcgacctcagccgctacaatgatatcgccacccgcttcgcccaggagcgggaggagacgctcaacttcctgaagtccggcattgcaacccgcaacccgtgtttcaaccggatgattgagcaaattgagcgcgtcgcgatacgctcccgttcgccaatcctgctcaatggcccgaccggcgcgggcaagtcgtttctcgcccgtcgcatctatgaactaaaactggcccgccaccagttcagcggcccgtttgtcgaagtgaactgcgccaccctgcgcggcgacacggcgatgtcggcgctgttcggccacgttaagggggcgtttaccggcgcgagagaggagcgtgcagggctgctgcgcagcgccgacggcggcatgttgtttcttgacgaagtgggagaactgggcgcggatgaacaggccatgttgctgaaagccattgaagaaaaacgcttttaccctttcggcagcgaccagcaggtcagcagcgatttccagttgattgccggcacggtgcgcgacctgcgccagcgggtggcggaggggacattccgcgaagacctgtacgcgcgtattaatctctggaccttcgaactaccgggcctgcgtcagcgccaggaagatattgagccaaaccttgactacgaactggaacgccacgcggcgctaaccggcgacagcgtgcgttttaataccgaagcgcgccgcgcctggctgagcttcgccacctcgccgcaggccgcctggcgcggtaacttccgcgaactctccgccagcgtcacccgcatggcgacgctggcggacaacgggcgaatcacggtcgaaacggtagacgatgaaatcgcgcgtttgcgctatagctggaatgaccatcgcccctccgcgctcgacggactgccgggcattgacgcaacggcgctggatctgtttgaccgtatgcaactggaaaacgtcgttgcggtctgccgccaggcgaaaaccctttccgacgccgggcggcagctattcaacgtttcccgtcaggggaaagccacggtgaatgacgctgaccggctgcgtaagtacctggcgcgttttgggctgacgtgggacgttttacagaattaacacagctccagttgaatatggttctccgtcaacacctgcatcacgcccggcggcggcagggtatcggtgtagaccgcatcgaccatactaatgctgcccatgtttaccatcgcgttacggccaaatttagagtgatccaccaccagcatcacgtggcgcgaattttcgataatcgcgcgcttggtgcgtacctcatggtagtcaaattccagcaacgagccgtcgctatcaataccgctaataccgagaatgccgaaatcgagacggaactgggcgataaagtcctgcgtcgcttcgccaataatgccgccgtcgcggctacggagttcaccgccggcgaggataatacgaaaatcctctttcgccattagcgtgttcgctacgttcaaattgttggtcacgatccgcaaattactgtgccctaacagggcgtgcgctacggcttccggcgtcgtgccgatatcaataaacagcgttgaaccattggggatctgggccgcgactttgcgagcgatgcgctctttttcttccgtttgcgtcgccttacgatcgtgccacggcgtgttcaccgagctggagggcaacgccgcgccgccgtggtggcgcaaaatcatattctgttccgccagatcgttaagatcccgacgaatggtttgcgggctgacagaaaaatgctccaccagctcttccgtactgacgtacccctgtttttttaccagttcaatgatcgcgtcatgccgttgtgtttgtttcatgaataatctctgaaagtaaccaaccttgcgccggatagcggcattcgccctacccggcctggaaaaatatctcgaccacaggccggatacgcctcacgttcgttttcgcgcattcagcgtatcaacaaaggccatcgctaaaccgacgataagcccggcgatgtgcgcgccgttcgccatagacatgccaaaccagtcaaaccaaccagcgactatccacaataatgcaaaaataattaagccgcgctggaggtaaattccgctttgcggatcgcgctctccacgcagccacacgtaacccatcagcgcatagacgacgccagacagtccgccaaaccacgggccgctaaatttctgctgtacatagccgcttagcagcgcgcttatcaccgtaatgacgattaatttaccgctgcccaggcgcttctctaccgccccgccgagataccaccaccacagcaggttaaaaagaatatgcatcagtgagaagtgcataaagatatgggtgaagtagcgccagacttcaaattttaaaaccggatcgaacggccacgccagccacaccatcaccgtctgatcgccgatgagactcatcgcgatatagaccagcacgcaggcgagcatcacgatccaggtaacagggccggctcgttcacgcagcgtggcgagaaagggaaaacggcgatagcgtagcccgctgttagtctgcccggactgccagctagccgccagataacgcggatcgccgggattttctataaaccgcgccagctcgccccgcacacgttcggcctgcgattcatctgccaaccagatatcgctttgattatgttgctgaatagtaagaatgacgccctgggtggccatgtaatcaacaaatgcctgcgccacgcgaggattcgcaaaggaagtaatcatcaacattattgctgtcgcttagtccatacaaaagaagacagtatatatacccttctcgtcggaggctgcatctttatgggattacgcgccattcgcgacatcggcagggaaacggcgatgccaggcctcaaacccgccgtcaatgctgtaaaccgcatcatagccttgctggagcagatactgcgcggcgcctttactactgttgccgtgatagcacattaccatcacggcggtatcgaaaccatgctcacgcataaacgcgcccagcgtatcgttagtcaagtgaaacgcctgcggcgcatgacccatggcataactttgcggatcgcgaatatcgaccagcaccgccgcgccctggtgcagtttctgatacgcctcttctacagtgatacattcaaattgttccatgaatcgctctttcattattgccggtgaagccaattaaggcattttatcgcccagtgtacgttgacggagtagcttagcgccataatgttatacatatcactctaaaatgttttttcgatgttaccaatagcgcgtttctttgctattatgttcgataacgaacatttttgaactttaacgaaagtgcaagagggcagcatggaaaccaaagatctgatcgtgataggcgggggcattaacggtgcaggcatcgcggctgatgccgccgggcgcggtttgtccgtactcatgctggaagcgcaggatttggcctgcgcaacctcttccgccagttcgaaacttatccacggcggcttacgctaccttgagcactacgagttccgtctggtcagcgaagcgctggcagaacgtgaagtgctgttgaaaatggcgccgcacatcgccttcccgatgcgttttcgtctgccgcaccgcccgcatttacgtccggcctggatgatccgtatcggtctgtttatgtacgatcacctcggcaaacgtaccagtttacccggttccaccggtgtgcggtttggcgcagattcggtgctcaaaccggaaatcgtgcgcggattcgaatattccgactgctgggtagacgatgcgcgtctggtgctggctaacgcacagatggtggtgcgtaaaggcggcgaagtccttacccgtactcgcgcaaccgccgctcgtcgggaaaatggcctgtggattgtcgaagcggaagatatcgacaccggtaaaaaatatgtctggcaggcgcgcggactggttaacgccaccggaccgtgggtcaaacagttcttcgacgaagggatgcacctgccgtcgccatatggcatccgcctgatcaaaggcagccatatcgtcgtgccgcgcgtccataatcagaagcaggcgtatattctgcaaaacgaagataagcgtatcgtctttgtcattccgtggatggaagagttttcgatcattggcacgaccgatgtcgaatataaaggcgatccgaaagcggtaaaaattgaagagagcgaaattaattacctgttgaaggtttataacgcgcacttccagaaacaactggggcgcgatgacatcgtctggacgtactccggcgtccgtccgctgtgcgatgatgagtccgactcaccgcaggcgatcactcgcgattatacccttgatattcatgatgaaaacggcaaagcgccgctgctttccgtgtttggcggtaagctcacgacctaccgtaagctggctgaacacgcgatggaaaaactggcgtcttattatccaggcatcgggccggcatggaccaaaacgtgcgtactgcccggcggcgacatcgacggcagccgcgaagattacgcggcgaagctgcgtcgtcgttatccgttcctgacggaatcgctggcgcgccactattcgcgcacttacggcagcaacacggagtggattctcggcgaagccacgtcgctgcttgatttaggcgaagatttcggtcatgagttttacgaggcggaactcaagtacctggtggatcacgaatgggtgcgccgtactgaagacgctatctggcgtcgcaccaaagaaggcatgtggctgaccgccgaacagcagtcccgcatcacccagtggctggcggcgtatgttgagaaacaccaactttcaatggcgtcgtaataaaatccggggcggtttataccgcccttttcgccacataccgcattcactcgccgggttttgtacagccgggcatatgattagtgatacggtagcgatcgacacttatttgggtaataaagaagggttttgcccgcgcttcgctattccagagagttttccccgttttacaccagcttttatgagaaaagttggcataatgaaccacactctcctcccccagcacgctttcaaaatgcgcgcgtttatcaccgtcggccacgctaaagtcagcataaaaaagattgctgtccaggttaaacgtcatctctatttcactggcggacgatggaaagaacacaggcagccaggtccagataccggattgctcgggtatggcggcataatcaggaaaatagcttacctggcgatcatcgcaggcggtcagcacagcgatgatgattaatgctgcaccacaccggaggacctgattaatcagctcagcaacaatatctttatgccacgaagtggattcacgccgtgcaatacgaatatcagcgccgctggccgggtctatgccaacccgttccacatataatttaacctcttccatttagtccctttatttcgcggccggatacagcggcacatatcccacatcctgcaccaactgttgtccctgcgggcttagaaaccagtccaccagcttttgtgtttccgctgtggggtgttcacgggtgaccatataaacatcaaccgtgtacgggtaactgccgttacgaatattttcaaccgtcggcgcaacatcgtttatcgccagtaatttaatctctttattgctgtgcatctgcgtagcgtaataacgaaaggtatagccaatggcgttgtgcgtattgcgatactcagccacgatatccaccatatcccccatcgcggttgccactgatgttgtttgcgctggcatcagcttcgtttctttcattaccttcgccagcatcgccgtttggctgccagagttttccggtcgctgccagggcttaatgtcgattgcctctccgcccacctcattccagtgggtgattcttccgctaaaaatgccgcgaatttgtacatcactcaacgatgacacgggattgttttggttgacgataaacacaaacgcttcacgtgcaaagggggtgtaaaccagttttacgccactggcctcggccaattgcttttgagcagtggaaggctgggcgacaaaaataagatcggcattaccgttaaggatattttgataggcttcaatggttccctggttttcaaggtagtcttcagggcagatatcatccggaaagcgcgtaagcgcataaaaagccgaggcgtataacggcaagccagccgttgcgccatcgagccgcggccaattttgagtgagcaaaagtgtcggttcatcgcgcagcccggttagcttgttgccccatgtgtgcgcctgataatcgcggaaataaagatattcactgctctcgggagcgggatacttcacggcataaagatgtgactggtatacggcacagctcccgaaaaacagcaggcaaatcaccagcaggttacgacaagtgtagcccgcaccgccgcgtagcactccccaacgcgcaccgccataccctaatgcaaaacagagctgcgagccaaccgggatgagcaacactgcccatacccagccgttgaaaaaggatattacgcggggtactaaccaaagcgtttgcaccacctgggcgatgggcttacaccctatcgcgcgaatattaagatcggtgagaaacatcaggatgacccaccccatcagcaccaccagagcgggcataagcaggcagcaatcacgccattctggatttacctctgatgcatttccctttccccatatccggccacaaagaaaaattaaccctgcgcccagaagcgctaccgggataatggtcgcctcctcaatagatcgcgcgacggggatactattttcaagaacgctaatgtacgcccacattccccccacgataatcgtaataatgttcaccagcagcggcacgccgataaacgccattatgattgacaaaaaaagccaattagcatttttcatttttctatccgctaatccctgcgataacggaagtataaacccggtagtcctgagcccacccatgcatttttctgaaatcgcgacgttaaaacattcacgatagcggcagacagaagttgaaagttccggctgccgttttttatttacaggctcacattaacctgcaagatcgatctttttccgcgcctgcccaacagcatcggcggcccgcaatgccgcctgcacagcctccggcgtaatggtaaacggctcgttgtgtatcgtttccccagtttgacaagacgccctggcaacggccagcagttcatcatcgctaacgccagccagaccaatatccgccagcgtggtgggcaagcctatatcttcacaaaattgataaacctcctcgataagctcaggcgctctatcggtgagcataagcattgccagcgtgccaaacgcaaccttttccccatgccagtatttgtgcgtggcgggcagtactgtcagaccgttatgaatggcgtgcgccgccgccagcccaccgctttcaaaaccaagcccggataatagcgtattcgcttcgataacatgttcgagcgccggagtaacctgatgttgttcacaggcaagtttcgccaggcgtccatagcgcattaaggtggtgtagcaaaagcgcgccagctcaaatgcggtcatcggtcctggcctggtggtcatattgccggcccctttgatgcggcaatcttccgcttcaaaccaggttgccagcgcatcgcctatcccggaaaccaaaaagcgtaccggcgcggcagcaataatactgctgtccaccagcacaagcgtcgggttacgtggaatcatcaggtagcgtttgaatttcccttctggcgtatagataacaaccagtgaactgcacggcgcatccgttgaggccagagtaggaaccacggcaataggcagccgcaggctggcgccggttgcttttgccgtatccagggttttcccgccccccataccaacaatcacatcggcgccaatttcctgcgcgcgtgcggagatgcgagcaatttcctcatcacagcactcgctactgaacacttcgatatcaaattcaatcaccccgtgcagtgctgttgcaactgtatcccggtaggtgttgtgaacaacaggatcctgcaaaatcagcgccttatgaccgagtgcggccaattcctgcgggagatgcgttgtcaacgctcctttaccctgaacatatcgtgacggaaagatcgcggtagtaaccattgtttctccttaaaaagcattaaagttcaatatacagaacacaaattccacataaagaatttaatgctgtttactctgaacgcacaatgaccaggtgagagcataatcttatcctgtgaggcagcgcacaattttggcgatgtattagaccgatgagcagtttccattgggttatccgctctttctcaccttatctccgttcatttttgaagcaaatcacaaaatataaccttccttagagtatggaattgacgctgtatgaatacgtcggcatagtgtcaatatacagaacagcagttccatatacagaacacatttttgatactaaagggatgcaatgatgagcattgaaatagagaaaccgaccacacgagggcgctggctgcatattattccagccacgatcctcgtttatatcgtggcctatatggacaggaccaatatcgccattgggatcgcaggcggcatggatgaagatttaggcatgacggcttcttttgccggtctggtagccgggatcttctttattggttatatcttcctgcaaattcccggcggtcagatagccgagcggctaagcgccaaaaagttaattgcctggacaatcgtcgcctggggtggctttgccctgctgaccggttttgttcagacaccgacgcagttgttgattattcgctttgtgctcggcgtggcggaaggtgctgtgtatcccgccattctggcgctgattggccactggttcccaaatgaggagcgcgccagggctatcgcctatttccagatgaacctggccgtcgcttctattattaccgggccgctttccggctggcttattgaaacctacggctggcgggagatgtttatcatcgaaggcttgctctctctgggactgctctttgtctggctacctttggtttccgatcacccgcatcaggcaaagtggctggatccgaaagagcgcgcctggatcgaacaaaaattgctggccgatcgcgcgttgagtattggcggagaacaaagcagcattcgcggcgtattaaaaagcatcaacctgtggaagcttgtcggtatctatttcttcgtacaggtcggcttctatggcttcgcgctatggatgccaaatctgattaaacacctgaccggcagcggcatgaccatcgttggggtactcactgcggcgccttacgttctgtgcatcatcggtcagtattacatcgccaaatggtgtgataaaacgatgaatcgccgcctttacacggctattcctctgctgggtttcgcggtctgcctcgccctctccttattactgaaagataacgtctggctcgcctacggcatgatggttatttgcgggttcttcctgcaagcctatgccggtccattctggacgctgccgccattactcttcgcccccaacgttctgggcggcgtgcgcggcacgatcaacgccctgggcaacatcggcggctttatcggtccgtacctcgtcgggctgttaacggtgacgttctcgcaaacagcaggaatgaccgtactggttgccgccctgcttatcgccgttggactgcttttcagcttaccttctgttaccgctcgtcctgcaggtagcagcaacacccctaacacctcgacgccgggtgcgtcacttaaacaggaaggaatcgccaaatgagccaaaaatgtcaacatgctcgcgacctgtggtcgcagctcgacgccctgcgtcttggaatgaattacagcaaagaagatgtcaataaactgcaggtcctggtggatgattgctatggtgaaagtcatccgggcagtttccatcttaaccaactgggcgatgaagccgtgctgggtgttcatgaaagcggcggtcgcgcggtccgtcaccatgtgacggatatctgcgacggctggggtcagggccacgatgggatgaactacatcctggcatctcgcgaagccattgccaacatggtcgaaattcatgcctcagtggtgccttatgatgccggtattctgatctcaagctgcgataaatctatcccggcgcatctgattgccgccgcacgcctgaacctgccgctactgcatattcccggcggttctatgcgtccggcaccgaatatgagtacttctgacctcggtgggatcactgctaagttgaagaaaggcgaaatcggcattcagcaagtggaagccatgcagcaatgcggttgccccaccgccggagcctgccagtttatgggaacggccagtaccatgcagtgcatgtcggaggccttggggctggccctgccaggcagcgctttgctgccatcgaccctggcggaaattcgccgcgttgccagaactgcaggccaccaggcgctgtatctggcggagaaaaatatcaccacccataagatcctgactcctgcggcgtttgaaaatgctatcaaagtccatgctgctattggtggcagcaccaatgcgatgatccaccttccggccatcgctcatgaacttggatgggagctgaagcccgaactgtttgatcggatcaataacgaaatcccttatctgaccaatattcagcccagcggtgaatacgttaccgaaatgatgtggttcgctggcggcgtgccaatggtgcaatggtatctgcgcgattatctggatcttgatgtgcttaccgtgactggccgtacgctcggcgacaacctggaaatgctccatcaatccggcttctttacccgcaaccacggttacctcaacaattacaaagtcagtccggaggaggtgatccgtaaaccagaaaatgccaccaaaaaagggtcgattgcggtactgaaaggcaacatcgcgcctgaaggagcggtcattaaatacgcggcctgtgcgccggatatgcaccaccataccggtcctgctcgggtctttaactccgaagaagacgctcagcaggccatcatccataaccatatcgaacccggcgacgtcattttcattcgctacgaaggcgcaaaaggctctggcgcaccggaaatgctgatgactaccgatgccatagtgtatgacaaacgcctcgacggaaaagtcgcattgattaccgacggtcgtttctctggagcgaccagcgggccatgtgtcggacacgtctcgccagaagccgctgatggggggccgattgccctggtggaagatggtgatttaatcgaaatggatgtgaaaggccgcaagctcaatattgtagggatcgacgggatgcctaaaacagaagaggaaatacgccgctgtcttgaagagcgtcgagcaagctggaagaaacctgattattcaaaccgtcgcggcgtctttaaacagttcaccgctaatgcaacatcattaatggccggagcctggcttaaataatatccctggcgggctacggctcgcctgttttaaggatcaatacatgactcagattacgaaatttcacggcgtatttccgccagttccgaccattgttaatgcgcagggagagttagataaagtcggcatggcaaccttgctggatcatcttattgcaagcaaggtcaatggcgtattactgctgggcagtggaggggaattttgccatatgaccaatgcgctgcgtctggaaaccgcagagttttgcgtccgtcatattaaccgccgtattccagtactattaggtattagcagcaccagcacgcaggaagtgattgagtatggtcagcatgccgaccgactcgaagtcgatgccgtgctggtactcaatccctactatgccagattgaccgatgagtatatttatcatcatttcaaaaccgtggctaataacataaaaagcccggtgattctctacaactttccagcattgacgggacaggaccttagcgttgatttaattacccggctggcgcaagatcaccccaatattatcggcattaaggataccgttgataatatcagccatattcgtgaaatcatcaataatgtcaggccagtgcgtccggacttcgttattttctccggctatgatgaatatatgatggatacgcttatcttaggcggcaacggcgggatcccagcgacagcgaactttgcgccacagctaacctgcgggatctaccgcgcgtggtgtgaaaaagagtatgagaccatgttcggattacagcgcaggctgtccgcgctttccactatttacagcctggattcacctttcttcgggataatcaaaaaggcaattcagcttagcggagtcgatatttcaactcatgtaatgccccccgttttgccggcaaatgaagaacatatttcgaatttgaagcagatcttacagcgtgcgggactttaagcgatgacgaaagcgggcttcttgcccgctatgtctttttatttcagcacatcagacgcgtcaggctacggctggcatccatcatcagcgtagcaagcgactcgcgtttatcatcggggatctggaacgtaacgccggatacgctcagggcggcgatcactttcccctgcgtattgaataccggcaccgcaatgcagcgcacgccaagggagtcttcttcgttatcataaccccagccgcgacggcgaattcctgctaactcctgcttaaggatattcacatccgtgatcgtcgtatccgtaaaacgcgttaatatctgatctggaggcagcaactcctccagctcttccccgctaagccatgcaatcagcacctttcccagccctgagctatgtaatgagaggcgcttgccctcccagcttcgaatcacaatagcctgtgggctttcgactttcagaaggtaaataggggcatcgccctccagaacgccaagatggcaggtcaggccggtgttatcgcgaatctcttcaagaatcggtaacgcgatttttttaatatcgtactgttccgccgctttattacctaattcatacaggcgtagccccagataatacttgtctttttcctggcgtaataacccatgctccaccatgccgttgagcaaagatgaggtactgcttttcgcaatccctgaattttgatggatctgggtaaacgttgcgccatcgcactccagaaggtaagcaaatacgcgcataattttatcgagagccggaatagatgtcgtaatctttttcatattattatcaattaattatggatttttctgctaatactatacaccagtactcgaccctttttccatgacagagaccaagtgccgctaacagattcagcagacgaatatcggcataccccccgaatataccacgataaaaaacggggccgtttggccccgttctcaagcgttaaaccgctacaaccgcaccggatcaatatgccagatattttcggcatactctttgatggttctgtccgatgagaagtagcccatattggcaatgttgagcatcgctttcgtcgtccattcttccgggcgacgatacaactcatccaccttatcctggcagtccacgtagctgcggtagtccgccagcacctgatagtgatcgccaaagttaatcagcgaatctaccagatcgcggtaacggcctggctcttccggattaaagacgccgctaccaatctgcgtcagtacctgatgtagctcttcatctttttcataatagtcgcgaggcttataaccctgcctgcgcaacgcttccacctcttcggcagtattaccgaagataaagatattctcctcgccgatatgctcctgcatctctacgttcgcgccatccagcgtaccaatggtgagcgcgccgttcagggcaaatttcatattactggtgccggaagcttctgtccctgccagcgaaatctgctcagacaggtcggcagcgggaatgatcacctgcgccaggctgacgctgtagttcgggataaacactactttcagcttgtcgccaatctgcggatcgttgttaatcactttcgccacgtcgttgatcagatgaataatgtgttttgccatgtaataggcggaagccgccttaccggcaaaaatattcacccgcggcacccagtcggcctccggattttctttaatgcggttatagcgggtaatgacatgcagtacattcatcaactgccgcttgtattcgtgaatacgcttaatctgcacgtcgaataacgctttagggttcaccaccacattcagttgttgcgctatcactaccgccagccgttttttattttccagcttcgcctgacgcaccgcatgattgaccagcggataatcacaatgctgcttcagctcgctgagctggctaagatcggtacgccaggtacgaccaatattctcatccagcacgtcagaaagcggcgggtttgccagcgccagccagcggcgcggcgtaacgccgttagtgacgttacaaaaacgggtcgggaaaatcttcgcaaaatccgcgaacagcgactgcaccatcaggttggaatggagttcagaaacgccgttgactttatggctgaccaccaccgccagccaggccatccgtacccggcgaccgttcgactcatcaataatcgacgcgcgtccaagcaggctggtatcgttgggatattgctcctgcaccgttttcaggaaatagtcgttaatctcgaagataatctgcaggtgacggggcagaattttccccagcatatcgacaggccaggtctccagcgcctcgctcatcaacgtatggttggtataagagaagacctgacagcacacctcaaacgcgtcgtcccagctaaatttatgttcatcaatcagcaggcgcatcagctcaggaattgacagcaccggatgcgtatcattgaggtgaatggcgattttatccgccagattctcataggttttatgcagttgataatgacggtgcaggatatcctgtaccgtcgccgagaccagaaaatactcctggcgcaggcgtagctctcgtccggaataggtggaatcgtccggatagagcacccgtgaaacgttctcagagtggtttttatcttccaccgccgcaaagtagtcgccctggttgaatttaccgaggttgatttcactactggcctgcgcattccacagccgcagtgtgttagtggcgtcggtgtcgtaaccggggatgatctgatcatacgcgacggccagaatctcttccgtctcaatccagcgcgcttttttaccttcctgctgaatgcgcccgccaaaaagcaccttatagcgcgtattgtggcgcttgaactcccacgggttgccatattccagccagtaatccggagactctttttgccgcccgtcgacaatattctgcttaaacatgccgtaatcgtagcgaatgccgtacccgcggcccggtaatcctagcgtcgccagcgagtccaggaagcaagccgccagccgtcctaagccgccgttgccaagccctgggtcattctcttcatcgatcagctcttcgagatctaagcccatggcctccagcgcgcctttaacgtcgtcataaatgcccaacgagagcagcgcgttagagagagtacgaccaatcaaaaactccatcgacaggtaataaacctgccgggtttcctgcgataattgggctcgattagaacgcagccagcgctccaccagacgatcgcgcaccgcgaacaacgtggcgttcagccattcgtgtttattggcaatgaccgggtctttaccaatcgtaaacatcagcttataggcaatagaatgcttaagcgcctcaacgctgagagtgggcgatgcataagtaaacggagcattcatataaatgattcctggatgactatttcaagcgatagtacagctcgcggtatgatttcgcggcaacttgccagctaaaatccatcgccatcgcctgccgttgtacaaaccgccaaagcgaaggccgtgaccacaacacaaaagcacgccgaatcgcgcgtagcaacgaccaggcattactgtcttcaaagacaaaaccgctggcgataccgtccgccagattttccagcgaactgtcggagaccgtatcggccaaccccccggtacgccgcaccagaggcagcgtgccatactttaagccatataactgcgttaagccgcacggttcgaaacgactgggcaccagaataacgtccgcgccgcccataatgcgatgcgagaaagcttcgtgatagccgatctgtacgccaacctgccctgggtgttccgccgccgccgcgaggaacccttcctgaagcaccggatcgcccgcgccgagtagcgccaactgcccgccctgctccagcagccccggtaacgcctccagcaccagatccagacctttctggttggtcagacggcttaccacggcgaacagcggcactttgtcgttaaccttcaaccccatcgcaatttgtagctgacgtttgttttccgccttctcttccagggtatcgcgcgtgtagcgcgacgccagcagcagatcggattccgggttccagatcttctcatccacgccgttcagtatgccggacaagcgcccttccagatgacgctgacgcagcaggccttccataccataagcaaactgcggttcagtaatttcacgcgcataggtcgggctcaccgccgttatatggtcggcatagtacaaaccggccttcaaaaaggagagttgtccgttgaactccagcccatgcatattaaagaatgaccacggcagttcgatgtcatccatatgctttgcataaaacatgccttgataggccaggttgtgtacggtaaagaccgatttcgccggccgcccgcgcgccgccagataggcgggcgccagcccggcgtgccagtcatgggcgtgcaccacgtcggggcgccagaatggatcaagtccgcaggccatttcacagccgacccaccctaacagggcaaagcgcagcacgttatcggtataggcatataaattcgtatcgtgatagggactgcctggacgctcgtacagatgcggcgcgtcgatcagataaatgcccacgccgttataatgcccgaacagcagcgatatcttacctgcgaaagtatcgcggcggctcaccacatgcgcgtcgggtatcccccgacggatatcgggaaaccctggaagcagaacgcgaacatcaacaccatccgcaatttgtgccgcaggcaacgcgcctatcacatccgccagccccccagtcttcagcagggggaacatctctgaacatacatgtaaaacctgcattatcgctcctgtttgacctgcagtttgcgcagcatttcacgcgtgaccagtacaataccttcttctgaacggtagaaacgacgagcgtcctcttccgcattttcaccaatcaccatgccttccgggataatacaggcacggtcaataacacagcgacgtaaacggcaggagcgccctacccaaacctcaggtaacaacactgccgaatcaatattacaaaaagaatttattctcacccgtgggaagagcacagattgcaccaccaccgaaccggagataatgcagccgccggagaccagcgagttcagcgtcataccgtggctaccggagcggtcctgcacgaatttcgcaggcggtagcgattccatatgcgtacggataggccagttctggtcatacatatccagctccggcgtcaccgaggctaaatccaggttcgccttccagtaagcttccagcgtacctacatcgcgccagtacggttcggcttgtggatcggactgcacgcaggagagcgggaaaggatgcgcgtaagccataccttcgcgggtgattttggggataatgtctttaccgaaatcgtggctggaagcgtcatctttatcgtctgccgccagcaattcatacaggtaatcggcgtcaaaaacgtaaatgcccatactggccagcgatttgctggcgtcaccaggcattgcggggggattcgccggtttttcgacaaaatcaataatcttgtcgctttcatcgaccgccatcacgccgaacgccgtcgcttctttgatcggcaccggcatacaggccaccgtgcaacgcgcgcccttttcaacgtgatcgatcaacatacgcgagtagtcctgcttgtagatatgatcgcctgccaggatgacgacatattccgctttatagcgacgaataatatccaggttctgggtcaccgcgtctgccgtgccgcgataccagttttcgcccttcatacgctgttgggctggcagcagatcgacaaattcgttcatctcttcgctaaacagtgaccagccgcgctgaatatgctgcaccagcgtatgggactgatactgagtgatcacgccgatacggcgaatcccggagttcagacaattagataaggcgaaatcgatgatgcggaacttcccaccaaagtggacggctggtttggcgcgtttgttcgttaaatcttttagacgcgtgccgcggccgccggccaggattagggcaacagatttcaatggcagctggcgcgccaacattacacgatcgttcttctctaaactcaccatgattaactccttttttatcctctctggaacacacacagtccatgcgcaggtccctgccagaccgccgttatcaccggattatcctctccagcgaatgggggaacggcgcgccattccccttcgggtaaaactatatctgtcacctcaagcgtggcatttatcgcaatcagaaaacggtccgacaacagaatttgcatcagcttaggcccgttttgccactcatccgcactcaagggttgcgcgtttttattcagccaacgcacgttgccatcgccttcttcccaccagctattgccggttaaagccggtatctgctgacgcaaacgaatcagcgcggcggtaaacgtggttaacccacgatttgcctgctgccagtccagccaggttaaggcattatcctgacagtaggcgttattgttgccatgctggctatggccgtgttcatcgcctgccagcagcatcggcgttccctgagagagcagtagcgtcgccagcagggcatgaatgctgtcgcgccgccgctccattaaatcaagcggaccgcctaatccttctttaccatgattgtcgctgtaattgctgttggtgccgtcgcgattttcctcaccgttcgcctcattgtgtttctgattgaaacagacgcagtcccggagcgtaaaaccgtcatgcgccgtgagcagattgacagaggcgccgggcgcgcggccattgcgtttaaacacatcgctggaagcggcgaaacgacaggcaaactccccggtcgtcaggttacgcggcaaccagaatcggcgggccgcatcgcgaaaatgatcgttccactcggcaaacggtggcggaaaattcccgacctgatagccgccctcgccaatatcccacggttcagcaatcagcttgaccgttgataacacaggacacgctttaatcgcggcaaacagcggcgcatcctggcgaaacgtcggcgtgcgccccatgacggacgccaaatcaaaacgaaaaccatcgacatgacaggtttccacccaatagcgcaaacactcgcacgcgtattccaccacgccgggatggcttaaattgagcgtgttgccgcaccccgtccagttgtgataatcgccatcgtcccttatccaataatagctacggttatcaattccgcgcagggagaaggttggaccgtccagatccagctcggcgctatggtttaatacgatgtccagaatgacctcaatccccgcacgatgcagcgctttcaccgcatcgcgaaactcgtccagcgccgtctcgggcgaactggcccaggcgggatgcagcgcgaacatcgccatcgggttataaccccaataattggtcagccccatacgttgcaggcgcggctcgctggcaaactgcgccaccggcaacagttccagcgccgtaatgccaagctgtttgaagtacgccaccatgaccggatgaccgagcgctttataggtaccgcgtatctcctgggggagctccggatgcaggtaggtaagccctttgacatgcgcttcatagatgaccgtttttccccacggcgtgcgcggcgcggcgtcatcttcccagtcataatggtcgctgattaccacgcttttcggcgccaccgccgcgttatcgcggtagtccggttcatcgtgtccgccgtgcaacagcggatgatcttttagttcgccctcgacccggcgcgcataaggatcaagcagtaacttcgccggattaaaccgatgcccctgcgctggctgccacgggccatgtacgcgatagccatagcgcaaacctggcctggcgccggccagataaccatgccagacatcgccgcgacgtcctggcaggtcatagcgacgctcattccctcgggaatcaaaaacgcacagctctacgcgctccgcatgggcggaaaagagcgtgaaattcacgccatgaccgtcatacgttgcgccatgcggcgttgcttcgccgatcgcaagctgcgtcattccccctcccgcatcagccagatcgtcgccaacggcggtaacgtcaggttaagagagtgctgacggccatggctttcgatctcatcgctgtgcaccacgccgccattgccggtgttgctaccgtgataatgcatcgaatcagtattgagaatttcacgccagcgtcccggctggttgatgccaaagcggtagtcgtggcgaggaacgggcgtaaagttgctggcgacgatgatctcgttaccggctttatcacggcgtacaaaaatcagtaccgagcgttcattgtcatcgaccaccagccactcaaagccgtaagcatcaaaatccagctcatgcaacgctttatggtggcgataggtgtggttgagatcgcgcaccagacgctgaaccccgtggtgccagttatcgcccccctccagcaggtgccagtcgaggctggcgtcatggttccactcgcgtccctgggcaaactcattccccataaacagcagtttcttgccggggaaggcccacatccaaccataataggcgcgcaggttggcgaatttttgccacgcatcgcccggcatacgatcgagaatggatttcttgccgtgaaccacctcatcgtgcgacagcggcagaacaaagttttcggtatggttgtacaacataccaaaggtcagcttgtcgtgatgatactggcggtacaccgggtccagcttcatgtagtccagcgtgtcgtgcatccagcccagattccacttgtaccagaaccccagcccacccgtttccggtggacgcgtcacgccagagaagtctgtcgactcttccgccatgctgaccgcgccgggcacctgctcgccaataatgcggttggtattacgcagaaactcaatggcttccaggttttcacgaccgccgaactcgttcggtatccactcgccctctttgcggctgtagtcgcggtagatcatagaggccaccgcatcgacacgcagcgcatcaatcccaaaacgctccatccagtacagggcgttacccaccagataattactgacttcacgacgaccatagttgtagatcagcgtattccagtcctggtgatagccctcgcgcgggtcgctgtgctcatagaggtgggtgccgtcaaactccgcgaggctaaattcatcggacgggaaatggcccggcacccagtcgagaatgacgttaaggcccgccgcatgggccgcattgatgaaataacggaagtcgtctcgcgtaccaaagcggcgggtcggcgcgtagaggccggtcggctggtagccccaactgccgtcaaacggatgttcgttgaccggcaagagttcaaggtgagtaaagcccatccatttggcgtaaggcacaagctgatccgccagctcacgatagctcagccagaaattgttatccgtatggcggcgccatgaacctaaatgcacctcataaatcgagatcggcgcatcaaactgattggctttttgtcgttcttcgcctggcgtcactttctccggcagtccgcaaatcatcgacgccgtttccggacgcatctgcgcctcaaaagcatagggatcggctttaatgcgcagattaccgttcgcatcaagcagctcgaatttatacagttgtccattatgcgcgccggggataaacagctcccaaataccgctctctttgcgcagacgcatcgggtggcgacgcccatcccaatagttgaattgcccgacaaccgaaacgcgacgagcattaggcgcccagacggagaaacgggtgccggtgacgccatccatcgtatcggcgtgcgcgcccagcgtttcataaggacgcaggtgggtgccttccgacaatagccaggcatccatttcctgtattaatggaccaaaacggtaaggatcgtcgatgaggttctgctgtccgtgccaggtcacggcgagctgatagcgaaagaaatttttacgtcggggtaaaacgccgcagaaaaaaccgcgagcgtcgagacattccagtttgccgactttacgtccggttttgggctcaatcacccatacgtcggtggcgtcaggtaagagggcgcggacttctagtccggcttgggtctggtgcattccgagtacggaaaaagggtccgcaaaatgtcctgcaattagcgcattaatcacgtctctatcgatacgactggacatggtttgtcatcctgttttgtggcgtcactccatctcactgaattcaacatcaggtagtgacacttctttgacctgaacggcgcagcacactgtgcatcctatctgcgtcgtcctaccttcaggttaggcttaatacccgtgggattaagctacccttaaagaatagccaatgctctgcttaactcctgataaaaatgaaacatctgcgtttactcctgtattacgcaaaaaaagggtgacgatgcacccctggtttaacacaaatttccccgccggatggcggcgctgacgcgccttatccggcctacagaaccacacgcaggcccgataagcgctgcaatagccactacgccaactggcgcagcattcgacgcagcggctcggcggcgccccataacaactggtcgcctacggtaaacgccgacaagaactctggccccatgttcagcttacgcagacgaccaaccggcgtagtcaacgtgccggtcaccgccgccggggttaattcgcgcatagtgatatcacgatcgttcggcaccactttcgcccacggattatgtgccgccagcagttcttccaccgtcggaatggatacctcttttttcagcttgatggtgaacgcctggctgtgacagcgcagcgcgccgacgcgcacacacaaaccatcaaccggaatcacagaggcagtattgagaatcttgttggtttccgcctggcctttccactcttcgcggctctggccgttatcgagctgtttgtcgatccaggggatcaggcttcccgccagcggtacgccaaagttatcaaccggcagctcgccgctgcgggtcaatgccgtaactttgcgttcaatatcaagaattgcggaagacggcgtcgccagttcatcggcgacatggccatacaactgacccatctgggttaacagctcgcgcatatggcgcgcgccgccgccggaggcggcctgataggtcgcgacggatacccagtcaacgagattatgggcaaagagaccgcccagcgacatcaacatcaggctaacggtacagttaccgcccacaaaggtcttcacgccattgttcaggccgtcggtaatcacgtcctggttgaccgggtcgagaataataatggcatcatctttcatgcgcagcgtagaagccgcatcaatccagtaaccctgccatccgctttcgcgcagctttggataaatttcgttggtataatcgccgccctggcaggtcacgatgatatcgagcgcttttagcgcatccagatcaaaagcgtcctgtagcgtgccggtggaggtgtcgccgaaggtgggcgccgcctgtccaaactgggaggtagaaaagaaaacagggcgaatagcgtcgaaatcgcgctcctctaccatgcgttgcatgagaacagagccgaccattccgcgccagccgataaaaccaacatttttcatagcgtttttttcctgcaaagagatgtgctgtgtatgcgcgccagtatcctgtggcgcatccttcaccatacaaaaagcagccaaagtcgcaagtgaaattaatcaatgatagcgaagccatcagtaatgcgacttatcctgccttaccgcgcaagcagaaagtccagtggcgattatcagggaatttgcgttaggaagggaatcatttccgtcgctgttttattgatcctaattatggatcagcgtagaaatttgcctgcttttatgcgcgtactgaaacatggcgaggcaaaatgtcgttgggcgattgccatgcacacctcaataaaaaaaccgggtagcgattacgccttacccggcttacggtgtcgatatgtgcccgtttccaggcccggtaagcaccgcgccaccgggcaacaagactcagctcagcagttggaaagcaatcatcccgacaatcgcgccgaccgtaccgaggatagtttccatcatcgtccaggtttttaacgtctgcgcttcggtcgcgccggtaaatttaccgaacagccagaagccagcgtcgttaacatgagaaaccacaattgaaccgccggcgatacagatagagagcgcagccatctgcgcgccggagaaattcagttgctctatgaccggcatcaccagaccgaccgcggttaaacacgccacggtcgcggaaccctgaatgatgcgcactgccgccgccagcacaaagcaggtaatggcaatcggcagtcccataccggttaacgcttcgcccagcgccgggccgacgccggagtcaaccagtacctgtttgaacaccccgcctgcgccaatcaccagcaggataatgcccgccggttgcagcgcgtggccacagatttccatcactttgtctttcggcatcccctgacgcatcgccaggccataaatcgctaccagacaagcgaccagaatcgcagtgaaggggtgaccgataaactcaaaccattcgtaagcggtggaaccttccggcacaaaacgcgcggcgatcgttttcagccctaccagcaccaacggcagcaggatcagcgacaggctgaagccgaaagaaggcattttgccttcgcccagatgcggctcggtaatgtcttccggtacatgcagttcaacgtaacggctgatgaaattgccccacagcggcccggcgataatcatgcccggaatggctgcgcacaggccaatcaggatcatccagccaaagtcagcgtgcatttgggatgccagcagcatcggcgcaggtcccggcagcaggaacgctgcggcagccgccacgcccgcaaacagcggaatgaccagcttcaccaggttcgttccggtgtggcgcgccattgagaacgccacgcttatcagcagcacaatcgccacttcaaagaacagcggtagcgcgcaaatcagaccggccaggccaatggcataatgcgcgcggctatgaccgaaagatttcagcatcttgacggcaatctgatcgaccgcgccggtctcgtgcagaatcttgccgaacatcgcccccagcgcgaccacaatcgccaggaatcccagcgtgccgcccatccctttttccatggtcgcggcgattttatcaagcggcatccctgaaaaaagccccgcgcccatcgagacgaccattaacgcgacgaaggcgtgcatacgcgccttcatcaccaaaaacagcagcagtaagacggaaccgacggcggttaaaaccagtgttaatgtactcacagcgtactgcctttattgatgacctcaatggtgctcgccacgacgccttccagcggctggtcgatatccaccaccagaacatcgcgttcgtcggcacccggctcttgcagcgtttcaaactgcgtcaccagcatttgggttttgaagaaatgacctttgcgcgctttcagacggctttcaatgacgtcgaaatcacctttcaggtagataaaggagaggttcgggtttccctcgcgcagcaggtcgcgatagtgttttttcagtgcggagcagacgatcagcgagattttattggtacgctgcatcgcgaaagcggcgtcgttcagcgcctgtaaccacggtttgcggtcatcatcattcaacggctcgccggaagccattttttcaatattgcagcgcggatgcagaaaatcgccgtccagaaacgcggcatgaagctgatgcgccacggcgcttgcgacagcggatttaccgctgcctgatacgcccatcagaacgtaaacgtggtgatcatgattagtcgtgctcaaagcgggcccccactctacaagttgcaaaatttgttacgggtaactgttatcggtaacattgtccaaccgcaccattcacgacgcaatgaccattcgtgccaaaagtgaataagtgtgagctacttcaaagttgtcagactaaatagatccgcccggtgacaaggtgaaacctaaatctaacattttcggcgtgaccgtttcgccgcgaatgcgggccaacagacgttccgcgccaatgctgcccattcgctcgcgtggcgtcaggacgcttgccagacgcggttccatcacctggccgatgtcatgaccgtggaacccggcgatcgccatgtcgtccgggatttttagccccaggcgctggcattcgaaggccgcccccaccgccaggtcatcgttggtgcaaaaaataccgtcaagctgtgggtattcgcgtcgcgcctggcgcatgagttcgataccggaagagtaggatgaagattgctccatcatcacactgtaaggaaccagccctgcgtcccgcatcgcctgttcatagcccttctgcttgatgatagtacgttcgtcgaggcgcgcccccagataggcgatatgacgatgaccacgcgcgataatcgcggcggtcatctgacgggcggcctcgaagttatcaaaaccgacggcaatatcgagacacggcgactggctgtccatcagttccaccaccggaatcccggcgacttcgatcatttttaaggtgcgcggcgtatgggtacgctcagtgaggatcaggccgtcgatattccaggagagcatcgattccaggcgctcctgctccatctccggtttatagccgtagtgcgccagcatggtttgataaccatgcgcgtcggtgacagcctcaatgccgcgtaacacttccgcaaagacctggttggttaaagacggcagcagaacgccaatggcgcgactggtggcgttggaaagaatgtcaggcgcgcgattaggaatgtacccgagctcatcaagcgcagccgcaattttaccccgcagcgcgacggagacctgctccggattacgcaaaaaacggctgaccgtcattttggtcacgcccacacggtcggccacatcctgaagtacgggtcttttctttttcatcgtcctgaaaggtataaaagggatagatttgcccagtttaccacggacatgcggaattaatgacaaacgatgaaaagccggatggcaacgctttcgcgtcttatccggcctacaaaaggttacagcacgttaaactggcggcaagtcaaacagcaacacttcactgtcgctgtcggcatgaatcgagattgcctgctcatcccaaatcgccaggccgtcgctggtggtggctttggtgccgttaatggtcacgttaccttttaccacctggatccagacgcggcgctcagcggcaatctgatgcaccgactgctcatctttgagcagcgcccagcggtacagctccatatcctggtggaccttcagcgaaccatcgcgagcatctggcgaaagcaccagttgcttgccctgcgcggcgtcgaagcggcgctgttcgtagcgcggcgtgatgccggtttcttgcggaatgatccagatctggtacagccgcagacgatccgttttgctcgggttgtactcggagtggcgaacgccggtcccggcgctcataatctggaattcaccggccggaacctgttctttattgcccatactgtcctggtgttctacggcgccttccagtacataggtcaaaatttccatgtctttatgcggatgcgtgccgaaaccctggcctgcgtcgatcacatcgtcgttaatcacacgcagcgccgagaaccccataaagttcggatcgtaataatcggcaaaagaaaaggtatgccaggagtcaagccagccatgattcgcatgaccgcggtcgtttgctttgcgtaagtagatcattgtgttcacccccagatgttttcgatggaataagtgtggactcattccgtccgggatcatagagggtgaaaattgactcctctgttcaaaaaatatgaataagcgcagaggagtctgtaagggctatttagccagggttatcgtcgcaggcgttgcctgttcgaaggcacgttcgaggatttccaggttggtaagaacttcagattccttgacgtaattaggcgtaccgacggtcaacgtctggtacagcgcatcatagacgcgaccatagtcacccgtttccggtttcacctcttctttcaccgtaacgccgtcgtcattgacatactccagcacgccgacggattcgtcagcggcgaaaccgggttcaccaggcataatgttcgctttcaggctggtttcttgttgatcgataccgtatttcacaaacgaacctttggtgccgtgaacaataaacttcggatagtcgattttcaccagatggctggttttcacaatggctttcaggtcaccgtagaacaattgcgcttcaaaggtgtcatccggattcgctttattacgcaggctacgaatgtcatacgcgacatgatccgggcggccaaatagcgaaataatttgatccatagtgtggacgccaagtccgtagaaagcgccatcctgcggcaggcccggtttggtttccgccacgggtcggtagtagtcaaaatggctttcaacttcgacaatcttgcccagtttcccgctctcaatcgcttttttagcagtgagaaaacaggaatcaaaacgccgattctgatacggcgtgacggtcagtcctttgcttcgcgccaggtcgaacaacacttttgcctccgccagcgtcggcgtgaaaggtttctcaaccagcacatttttacccgcttccagcgcgcgtttagcgtattcgaaatggctgtcagcatgcgtacagacgatcaccagttttacctgcggatcgcccaacacctcatccagatcgctggtgaagtgaatatgcgaatactgcggcgcctgctcttccggtttagcgtgacgacggaaaatatgcgcgacatgccaggtatctttccgattcagaacataggggagatggtaacgggtggtacttttgccgaatccaataaatgcgcagtgtaaggtcatgagacgatccttttgaagatgattgtctacaccatagcgtaaagcgtgaggagactgaatgttggattctttgccggatgcggcgttgcctttttgggcctacaaaagcagatgcctcaagatcggccgtcggcgtcgcggtcagtttgttcacggcaagcgcgcagggcccggagcgtactaaatgtacgtgaggagcacgagcacttcccggggacaaaatgacaagtaagccaggctgaaacaaaacccaaaaaaaaagccagcaaaagctggccaaaataatactggaagcaatgtgagcaatgtcgtgctttcaggttctccgtaggggttcccctgaatgcaaggcaataataatcattctcattcgcagttgtctacttctttttgcaaaaaaaatgcggttgacggaattttctttctcagcgagtgtaaatacacaattaaccctgcaggagataaggaatgagtgaaatagtgatacgccacgctgaaccgaaagattacgatgccattcgtcagatccacgcccagccggaggtgtaccacaacatgctacaggttcctcatccttccctcgaaatgtggcaggcgcggctaaccgagcaagccggggttaaacaactggttgcctgcattgacgatattgtcgttggccatctttctattcaggtcacccaacgtcctcgccgcagccacgtggccgattttggcatctgcgtggatgcccggtggcacaatcgcggcattgccagcgcgctgatccgcacgatgatcgacatgtgcgacaactggctgcgcgttgaccgtattgagttaacggtgtttgttgataacgagcccgccgtggcggtgtataagaagtacggctttgaaatcgaaggcaccggtaagaaatacggcctgcgcaacggtgagtacgttgatgcgtactttatggcgcgcgtgaaataacgcttccccgccccaccctgtggggcgaaacgtcacaaaccttcacaacattccagttattgcaacctacttcccctatatcaaaacaataaccatctgaatttcatggttattaccactttaagctttatcaccgttttttccgtaattttagcaatattaatattacatttttgtttttttttggtttctgccatcactttatggtgacaatcacaacaatatactcctcccgggactaatttaaccacggtgaggtaaaaaatgaaatttgaacgccatcatagaatattgaaggaactcagtatttcgggagttgtaaaagtttcaaatctggcgaaaagtctcaaggtaacaaaggaaactattcgttcagatctcaatgaacttgccggacagggatatcttactcgctgtcatggtggtgcatttattacccttgattctcttgataacgtcgcaaaaaatgaaattgcttatgtgctggaaaaatatgaatcagcgcagaaaataaaaaaaggtctctctgccatgaaaaataatgtatgtgttattggctcgttcaatgttgatattatcagttatctaccgagattaccctcaacgggagaatcattgctggccgataaatttattttttcacccggcggtaagggatgtaatcaggcattagcagcaagctatgccgattctgatgtgcattttattactaaagtcggctcagatcattttagtgattacgccattaattttataaactcatcaaaaatccataaaagtgttatctaccagaccaaagaaacacaaacaggtacagcaaccatcatggtgaatggagataccggagataacgtcatcgctatctaccctggcgccaacatgacaatttcccctgatgaaatcaccattcagaaagaagccattgttcattcagatattgttcttgtccaactggagacgaattacgaagcgctgcagcaaacaattcgtctcgcacaaaaaaatgacataccggtcatcatcaatccagcgccgtacaatgacatggttaacaccatcattgataacattgattatattacgccaaatgaaacggaagcaggcctgctggccaatatggcggttaatgatatcgaatcagccaaatgcgcggccaaaattattcatcagaaaggcgtcaaaaataccattattacattaggtagcaaaggttcgcttgcttatgatggcacacaattcatctattccccggcatttccggcagttgtaaaaaatacggcgggagcgggtgacgctttcaatggcgccctcgcatctggtcttgcaaaaggaaagtcactggcatccgcattgtgctacgccagcgcatttgcctcacttgcggttgaaacgcctaatgcctctgatatgccggaaaacgactccgttcttcatcgtattcagggttcacattacaaacaaactatctctactcactaaatcaaggagcagactatgaacaatacgcagaaaaaactaaaggtgctctttattggagaatcctggcatattcatatgattcattcaaaaggttatgacagtttcacctccagtaaatatgaagaaggcgctacatggttactggaatgcttgaggaaaggcggcgttgatattgattacatgcctgcccacacggtacaaattgcctttccagagagtattgacgaattaaaccgttacgatgttattgttattagcgacattggtagtaataccttcctgttgcaaaacgagacattttatcagctaaaaataaaaccaaacgctctggagtccattaaagagtacgtcaaaaatggcggtggactactcatgattggtggctatctgtcgttcatgggtattgaggcaaaagccaattataagaacaccgttcttgctgaggttctgccagttattatgcttgatggcgatgaccgggtagaaaagcccgagggtatctgtgctgaggctgtctcacctgaacatcctgttgttaacgggttctcagattatccggtatttcttggatataaccaggccgtcgccagagacgatgccgatgtcgtattaacaataaataatgacccattgttagtgttcggtgaataccaacagggtaaaaccgcctgctttatgagtgactgctccccacactggggaacccagcagtttatgtcatggccgttttataccgacctgtgggtcaacacgcttcaattcatcgccagaaaataaaaaacaatggagtaacgaaagttactccttttataaaatataaggattgatgtatgaacaagaataagtactcaacccccttactgatgcttgccaccatcttagccggtatgctttccccgatgcagtctgccgttaatgggcagttaggacattggttacaagacggtaatgcttgcgcagtaatctcgtttgccagcggtctggtcgtcatgttttttattattattgcgcgcaaagaaacacgccagcaattcgcctcaatccctactctgattaaaaagagaaaaatcccgctatggaattggtttgcaggattatgcggggcgatggtcgtattttctgaaggcgcatccgccagcgcgctgggcgttgccacctttcaaacggcattaatttccgccctgctcctttccggactgctgtgcgaccgttttggcatcggtgtggaggagaagaaatattttacgccatggcgcattactggcgcattgttcgccgttatcgccaccatttttgtcgtgtcgccacagtggcactcaacctcgtttatcctgctcgctatcctcccctttttggcagggttactcgctggctggcagcctgcggggaatacgaaagtcgccgaggcaacgggctccatgctggtgtccattacatggaacttcatcgtcggcttttgtgtcctgggcgcggcgctggcgatacgtatcgcattaggccatgtcaccatccagttacccgatacatggtggatgtatctcggtggtccgctgggtctgctgtccatcgggctaatggcgattctggtgagaggcttagggctattgatgctgggcgtagcgtcaacagcaggccaactgcttggctcagtgctaattgatgaattgatcccttcattaggcaatacggtctacctggtcaccatcatcggtacgctgttcgcgttagtcggtgcgattgtgaccaccatccctgaatacagagcatccaaaatggcgcaaagaatagaggtgtcagaatgaaaggtttcctgcaaaccgtaacaggcccggtggcgcatacggatatggggctgacgctaccgcatgaacatctgtttaacgatctgtcttcggtcgtagacgagccacattatgctttttcacagcaactggtgggaaagaaagtcagtgctgacctgcagtggggactgaaacacgacccatactgctgcgccgataacatggaccgcaaagagattgatgatgttatcttcgaaatcaataactttatgtctttgggcggcaggacgattgtcgacgccaccggatcagaatccattggacgggacgcctcagcgctgcgagaagttgccttaaaaacgggtttgaatatcgttgcgtcatccggaccttatctggagaaatttgaaagtacccggatccataaacctgttgagctgttagcctcactcattgataaagaactgaatcagggtattggcgagacggatattcgcgctggcatgatcggtgaaatcggcgtatcccccgcgtttacccaagcggagcgtaacagcctgcgggcagcgtctctggcacaatgtaacaacccccacacggcaatgaatatccatatgccggggtggctgcggctgggggatgaggtgctggatatcgtgctggaagaaatgaacgtctctccggcaaaagtctcgctggcgcattcggacccttcaggaaaagatgtcgtctatcaacgtaaaatgctcgaccgtggcgtatggcttgaatttgacatgattggtctggacatcaccttcccaaaagaaggtgtcgcgccgggcgttcaggagaccgcagatgcagtagcgaatctgattgcactgggttacgccgaccaaatcgttttaagccatgatgtttttctcaaacagatgtgggcgaaaaatggcggaaatggctgggggtttgtcccgaatgtcttcctcgcctatctggctgctcgcggagtagacaacgatactctgcgcaagctttgtattgataatccagcccgattactcacggcataatctgcaaatagcccggtgtctgacaccgggcctggaattaaaaatcagtatcccgccgttaaatcatccaccgaacgcgggtcggaagcgccatacagttcaccatccggtccaaccataatactttgggtgctgcccatcgcttctttcagcgccactttctgccctttctgttccagcaactttagcgtatcggggctgaagcccttttctacccgcagttcgtccggcaaccattgatgatggaaacgcggcgcgttggtcgcttcggcgacgttcatgccaaaatcaatgctattcactaccatttgcagcacagtagtgatgattcgactcccgccagggctgccggtcaccagccaggttttgccctctttaacgacgatagtgggcgacatcgacgacagcggacgcttcttcggaccgaccgcgttagcatcgccgcccaccaggccataaacattaggtacaccgggtttagcagaaaaatcatccatttgattattcagcagaataccggtatttcccgccacaattcctgtgccgaaggtggtgttcagggtataggtcaccgccacagcattgccgtctttatccaccaccgagaagtgggtggtctggttgctttcatacggggcgagcttgcccggttttatctggctggaaggtttggccttgttgatatcaatttgatcggccagcgttttcgcataggctttgtgggtcagcgcctgccacggcactttcacaaagtccggatcgcccagatactctgagcggtcagcgtaggcgtatttttccgcttccgccatgatttgcatggcatcggcgctgccaaagccgtacttcttcatgtcgaaattttcaagaatattaaggatctgtacgatgtgaataccgcccgaggatggcggcggcatggagaagacctgatacccgcgatagtcaccgctgattggcgtacgctcaacggctttatagttggctaaatcctctttggtcatcagaccgccgttcttctgcatttctccggctatttggtcagcaatcgcccctttataaaacgcatccgggccgttttcggcaatcatttccaggcttttcgccagattcttctggaccagcttatcgccttttttcagcggctcgccgtctttccagaaaatggctttgctgttctcatggttgaggatcacttcgctgccgtaagtttttaagtcgttggccagcgcatcgttaaccacaaaaccctcttccgccagcttcatcgccggacgcaccactttattcagcggcatcgtgccgtatttctccagcgccagcgagaaccccgccacggtacccggcgtaccggatgccagatgcgacgtcagcgactttttcgcatcggcgttaccctgatcgtcgaggaacatatcacgggtcgcgccagcaggcgccatttcacgaaaatcgatcgccgtggtagcgccatctttagtgcgcagcagcataaatcccccgccgcccagatttccggcttgcggatgcgtgacagccagcgcatagcccacggcgacggcggcatccacggcattaccgccctgctttaagatatccacgccaacctgcgtcgccattgcatccaccgaggccaccatcccttgcgtcgcccgcacaggatgaaagacatcttcttcaacaccataggagactggcggcgcgacgggaggattggccaccgcgctaaacgtccccccggccagcagagcggcgatcgccacccagcgcataaacgttggtttcatcgttgtttttctccagataaatgggtgtatgtcccgtttaatcctggcccacaacgcttaaaaaatcatcatcatggcgaaatagaggtacacttaaaaagaggcctcatcgggaggagacgacaatgaaacgcttactacttattacggctttgttaccctttgctgtattggcccagccaattaacactatgaataatcctaatcagccaggttatcagatccccagccagcagcgtatgcagacgcagatgcaaacgcagcagattcagcagcagggtatgttgaaacaacagatgcaaacgcaggcgcgcagccagcagcaaaatctacagtcgcagttgaatgccaatacgcagcgggttcagcagggacagccgggcaacggtatgctcggtcagcaaacgctgcccaatacgcagggcggaatgctcagcggcagtggaaatccggaccggatgctaaaccattcccagccaatgttgcagcaggacagcgggacgccgcagcctgacatcccgctgaaaaccatcagcccttaaaactgacggcccttaaaactgaaagtgagggccgatgtcatcaatgcgatcggtgcagatacaatccacgccccagcgcagcagctctgccgcccgctggggctgattgacggtatacaccagaatccgcagacccgcggctttaatctcttgcactcgcgtctcatcgagtaatttatggttgagatggagggaaacacagcccagacgggtcgtcagttcacgccagtcttcacgccatttatccagcagtaacccgcgcggcagttcaggtgctgccgcctgcgccgcttccagcgcctctatctcaaaggaagaaagcagcggcggcgtcatcccggcccacagttcgcgggcggccaacgccacgacgcgtcctgttagccttccgctccccgttgtcggtttgatctcaatattcgccatcatgccgtgtttacggcagcgctccgccacctgcgagagcagcggcagcggctcgcctttaaattcgccgctaaaccaaccgccagcgtccacacgcaataaatcctgccagttcaactcgcccgccacgccccaaccattgctggtgcgctccaggttatcgtcatgcagcaggaaaatttcgccgtctttcgacagcttggcatcaaactcaatcatggtgtgcccgtatcgcgcgcccacgtcaatcgccgccagagtgttttccggcgccagtttaccgccgccgcgatgggcgacaatgtggggataaggccagttactcatacacgttgtcctgtttcgccatcaaaaagatgtcgctgatgttccggcagatgcagccatagcgtactgcccgccgccgggcgctgctgatgcgccaaccgcaccaccagtttctgatcgccccagcgcccatgcgccagattatccgcgcccagaatctccagcgtatctaccgttagcggcacgccgccttccgcctgcgagcttaacgcaatatgctccggtcggatacccagcgtcatgttacgtccggcatgaccccgatagtccgcacctatcggtaacgccagaccgccaggcaattcgaaacggtcgccggaagcgctgataacgccatccaacaggttcatcgccgggctgccgataaagctcgccacgaagcgactggccggtttttcatatacctctaccggcgtgccaatctgttctgcgacgcctttattcatcaccatcacccgctgggccagcgtcatcgcctctacctgatcgtgagtaacatagagcgaggtggtacgaagacgacgatgcagatgttgtaactccagacgcatctgcacgcgcagcttggcgtcgaggttagagagcggttcgtcgaataaaaagactgccggctcgcggacgatcgcgcgccccattgccacgcgctgccgttgaccgccggaaagctcgcgtggacggcgtttaagcaggccgtccagctccagaatgcgcgccgcctcccgcacacgttcttcaatatgcgctttgctcataccacgaatttttagtccccacgccatgttctcctctacgctcatatggggatagagagcatagttctgaaataccatcgcgatgccgcgatctttgggctccatctcggtgacccgtttgcgatcaatccagatatcgccgctggtcacgcgttccagaccagccaccatccgcaacaacgttgatttgccgcagccggacggcccgaccatcacgataaattcgccatccgccacgtccagcgtcagcggttgaatgacctgggttttgccgtcccagcttttggttactgcctgtagttttaaaccagccattttatttctcactatcgaccaggccacgcacaaacgcgcgctgcatggctaacacaattacgaccggagggataagggtgagcagcattgccgccatcacctggttccattgcgtggtaccttcgccggtggcgatcatccctttgatacccgctacggcagtgccaagattcacgtcggtgataatcaacagcggccacagatactggttccagccgtagataaaggtgatgacgaataacgccgccaggttggtttttgacagcggcaacacgatgtcgcggaaaaagcgcatcggcgacgcgccgtcaatacgggccgcctccaccagttcatccggaagcgtcatgaagaactgacgaaacaggaaagtggcggtagcggacgccatcagcggtagcgtcagaccagcatagctgtcgagcattttcaggttggcgatcacttctaccgtcgggaagatacgcacttcaaccggcagcatcagggtgataaaaatcatccagaagaacaggttacgcaggggaaaacgaaaccagacgatggcgaatgcggaaagcatagataccgtgattttgcctaccgtaatgctgaacgccataatgaaactgttaagcatcatcagccagaatggcgcgctattaacaccgacgccgttgacccaaatagttttgatattctccagtaactgcgtgccgggaagcagcgtcatcggcgtctcaaacaccgcacggtcgtccagcgtcgccgcgacaaacgcgacatacagcggaaacaaaatgaccgcgatccccagaatcagcatggtatggctgaatattgtcagcccgcgacgattctctatcattggtaacgcaccttactttccacatagcggaactgcaccaccgtcagaatgatgacgaggaacatcaacactaccgactgcgcggcggacgccgagagatccaggccggtaaacccttcgcgataaatcttataaatcagcgtcgtagtggcttgtaccggcccgccggcggtcgcggcgtcgatcaccgggaaggtgtcgaaaaaggcgtacaccaggttgaccaccagcaggaagaaactgaccggcgcaataagcggcaaagaaagccggaagaaacgacgaatcggcccggcgccgtcaatggccgccgcttccaccagcgagcggggaatggattgcagcgcggcaaagaagaataaaaagttgtaactaatctgcttccagactgacgcaaataccaccaggaacatcgcctgaccgctgttttgcgcgtggttccagtcatagccgaattcgccaaggaaatgggtgattaatccccgccccgggttaaacaggaaaatccacaatacggcggcgacggcgggcgcgacggcataaggcagcagcatcagcgtctgataaaaacggctgccgcgcaccacgtaatccaccagggcggcgaaaaacagcgagaccagcaggccgctaaacgtgaccagcgcgctgaatttaatcgtcgtccagaaggcgtcgagataataactgtcgtgaaaaagcgcgacgaaattctccagcccgacaaattggctggaaaaaccaaacggatcgacgctttgcagcgaataccacagcgcttcgcccgcaggccagataaagaaaataacggtgataaccaactgcggggcaaccagtaaatacggcagccagcgcgagcggaacaccggacgggatgatgacatgaaggttcttttcctggaaggtgccggatggcggtgcatgcaccttatccggcacttatacacttaagatttgctcgctttctcaaaacgacgcagcaactgattcccgcgatccactgcggtatccaacgcctgttgtggggttttcttcccggtccagacgctttccagctcttcgtccacgatggtacgaatctgcggcatattgcccagacgcaagcctttggtgaagggtaacggcggcttattcaacatctggcgagtggcgatatccgcaccggggtttttatcgtaataaccctgctcgcgggtcagctcgtaggcggcggtggtaatcggcaggtagccggttttttgatgccattcagcagcgttttccggttttgccaggaagtcgaggaatttggcgacgccggtataggtttctttatctttaccctgcatgacccataggctggctccgccgataatggcgttttgcggcgcgcccttgatatcagcgtcgtacggcatcatacccacgccatagttaaatttggcatactggcggatattggcgagcgagccggaggacgcggttgtcatcgcgcagtcaccgttataaaacttctcggtagactcgtccttacgcccaacatagctaaaatcgcctttcttattcatctcttccagcagcgcgatatgtttcacctgctctggcttattaaactccagcaccgcatctgtaccgtcaaagccattgtttttactggcgaaggggagaccgttccaggcgctgaagttttccagttggatccagccttgccagccgctggcgtaaccgcatttcatgcctgccgctctcaatttcgcggtatagtcagccagctcctgccaggttttcggcggctgctccggatctaaaccggctttcttaaaggcgtctttgttgtagtacagtaccggcgtggagctgttaaagggctgggagagcagatgcccgcttttagcatcggtgtagtagcctgcaacggtcggtacaaactgggactcgtcaaagttaataccggcgtctttaaacacttcataaaccggcttaatggctttcgaggccatcatggtcgccgtcccaacctcataaacctgcaatattgccggcgcgttgccggtacggaatgccgcgatcccggcgctcaggttctgttcatagttccccttatagaccggaacgattttgtaatccggattggcctggttgaaacgttgcgccagtgaatcaacttctttgcctaactccccttccattgaatgccagaatggaatagtggtgacggccaacgcctgacccgtaaatgccagactcagcgccagtcctaaagctgtatgtcgtaacgatatcatcggttatctctctttttgtgccgggatgcgcgatatcacgcgttttatgttcgcgggggtaacatgacatgctcgaatgacagaaaaataacttttttattacaaaaaaaagatagtaaggcgacagagagatggcaaggcagcgaaagcgccggaaaagaaaagtgggagctacggcacggataggtacgacattattctcggggcggcgcacatgccgtaacccaaccaggcggagcgtcgccgggattaacgtctcaggcacgtaagcgaacggcaatttgctccagcgtaagccgccctgccgccgcatcgactgtcatatcgacaaaatccggattcgcagcgagtgagatcccgttacgctttaaaaacagcagcgtaataaataaggcggtacgtttgttaccatcattgaagatatgcccacgggatatagcgagcaaatgcattgccgccagcagccacacgtcggtcaccccttcatattcgatttgcttgagtacccggtacattagcgcttccgcgcggccaggatcaggcatgcctgttacaccaggcgtaacgcggagaagcctgtcgtgaaactgaattatctcttccgctgagataagttgtagggtcatttatccgccagctccctgagctcattgccatgaaccgccataatggcagcaaactcatcatccattcgcgccgtctgataacgctcaaactcctcggcgctgatgatcactgcggacttatgcccacgacgcgtgatggtaacaggcccccccgtcaccgcactttccaggacttcggccagattttgccgcgcttcgctatagttaaccgtacgcataaacatctccccagttgtacatgtttattgtacaacaaacatgtacaaaaaaagagccatcaggctcttttgaaaaattttaccgcttgccgttaccgggggcggcgcacgcgcttcccccctggcacagtctaaccgcccagataggcgctgcgcaccgcttcgttcgccagcagtgcatcaccggtatcggatagcaccacgtggccgttttccagcacataaccgcggtcggcgagcttcagcgcctggttggcgttctgctcgacaaggaagatggtcataccctgctcgcgcaactgctcaatggtgtcgaagatctgctggatgatgatcggcgccagccccagcgacggttcatccagcagcaatagcctcggctggctcatcagcgcgcggccaatcgccagcatctgctgttcgccgccggacatggtgcccgctcgctggatacggcgctcatgcaggcgcggaaacagctcgtacacccatttgatacgctcctgaaaccgatcgcgctcggcaaaaaaaccgcccatcgccaggttctcttctaccgtcatccgcgagaagacgcgccgcccttccggcactatcgccaccgcttcacgcatgattttcgccgtctgccagtcggttatgtctttaccgtcaaacaccacccgtccgctggaggcgcgcggatcgccgcacaaggtgccaagcagcgtcgttttccccgcgccgttagcgccaatcagggtaacgatttccccctggttgatgtgcagactgacgtcgtgcagcgcctgaatcttgccgtagtgggcgctgactttttcaaacgttaacatcgttttttccatcttatgcctcacccagataagcgcggatgacgtccgggttgttgcggatctcttccggcgtgccgttcgccagcggcgtgccctggttcaccacgtaaatgcgatcggaaatgcccatcaccagcttcatatcgtgttcaatcagcaagatagtggtgttgtgatggttacgtagttcggcaatcagctcatccagctctttggtctctttcgggttaaggccagccgccggttcgtcgagcatcagaatttctggctgcgtcaccatgcagcgggcaatctccagccggcgctggtcgccgtaggccagattactggcctggcggttggcatgttccagcaggccaatacgctcaagccaggtcgccgcgcggtccagcgcttcgctttgcgcgcggcggaaagcgggcgttttcaacaggccggaaaagaggcccgttttcagttgctggtgctgcgccaccagcagattttcaatcaccgtcatttcgcgaaacaggcgcacatgctggaaagtgcgtaccacgcccatgcgggcgatctgctggcccggcaatccttccagatgccgctcgcgcaacgtgatcgtaccgcctgtcggcttataaaaaccggtcaggcagttaaacaccgtcgttttacccgcgccgttagggccaatcagcgacacaatttcccgctcacgcaattccagcgatacattgttgaccgccagcaaaccgccaaagcgcatcatcaggccgttaaccgctaataatggctgactcatgcctgctctcctttcgcctgaccacttttcagcttcaactgcggacgcgtcatcggcagcaatccctgcgggcgccagatcatcatcaacaccatcaaaccgccgagcatcaacatgctgtattcgttgaagtcgcgcatcaactcgcgcgacaccaccagcagaaccgccgccaggatcaccgcaaactgcgagcccattccgcccagcaccacaatcgccagcacgaaggcggattcggcgaaagtgaaggattccgggctgacaaagccctggcgggcggcaaacaacgtcccggcgaaaccggcaaacgcggcgctgatagtaaaagcggtcagcttgatgcgcgtcgggcttaaacctaatgagcgacaggcgatctcatcttcacgcaacgcttcccacgcccggcccagcggcatacgcagcaggcggttaatgacaaacagcgacaggaccaccagcaacagggccaccagatagaggaaaatgacccggtcggatgggtcgtacttcacgccaaagaaattgctgaaggtatcccagccgccttcgcgggtgctgcggctaaactccagaccaaacagcgtcggtttcgggatctggctgatgccgttcgggccgccggtaatttcagtgttgttgagcagcaggatacggacgatttcgccgaagccgagcgtcacaatcgccagatagtcgccgcgcagacgcagtaccgggaagccgagcaggaaaccagcagcggcggagaccagtcccgccagcggcaggcaggtccagaaacccaaaccataatagtggttgagcagcgcaaaggtataagcgccgatggcgtaaaagccgccgtagcccaataccagcagaccggacagccccaccaccacgttcagccccagaccgaggatgatataaatcatggtcatggtggcgatatcgacgctaccgcgcgacaccataaacggccatgccacggcgataaccagcagcgccatcagaaacagcttttgcttaacggtagagccatcgatcgccggcagaataaacttcggtccggagacgtgcttcaccgctttctggaacatcggacgcagcaactgaaagaaaaaaaccactgccgtaccgataaagatccactgccagcggatgtcggcggcggtatccaccaccagtttggtgccgtccagctccagttgtacgcccatgaagacgccagccagaacgaagaacatcgccgcagagaacagagccatcgcaatatgcatcggtttcatactttctctacctccggacgccccaggataccggtcggcatcaccagcagtaccagaatcagcagagcgaacgatacgacatctttatattcggtacttaaatatgcagacgagagcgcttcggcgacgcccaaaatcagaccgccgatcatcgcgcccggaatgctgccaatcccgcccagcaccgccgcggtgaacgctttcatcccggccataaaaccgatgtaggggttaattacgccatagaactgaccgagcagcacgcccgccaccgccgccattgccgcgccgataacaaacgttagcgcaatgacgcggtcggtattaatgccgagcaggctggccattttcagatcctccgcgcaggcgcggcaggcgcggcccatccgggagtagcgaatgaaaatggtgagcgccagcatagccagaaaggtgactatccagataaccgcctgcatggtggtgatggacgcggaaaagttttcgctgctgcccacaatccactggccgttaaacaggctgggtaacgccacgtcgcgcgaaccttccgtcaggctgacgtagttttgcaggaagatggacatcccgatggcggaaatcagggcaatcaggcgcttggagttgcgcacgggccggtaagcgactcgctcgatactccagccgtaggcgctggcaataataatcgcaccgataaatccagcggccaccaggagccaactggtgtctattcccatcatcattagcgcggcgatgatcataaaagagacgtagctgccgatcatatacacctcgccatgagcgaagttgatcatgccgataatgccgtacaccatcgtataaccgatagcaatcagcgcgtaggtgctccccagcgtgacgccgttaaacatctgctgcaagaaatagagaaactgctcggacataaggtaacctttttaaacccgcccggcgtgcgggcggtgggataacttatcttctggcattacttcgcgacggttgacgagccgtcggcgtgccactggaagacgccaaattcaaatcccttaagatcgcctttttcatcccatttcagcggcccaataacggtatcagccccgttagctttaagatctttcaccagatccagcggagcatggctggcgctacgcgtcattgcggtcgccagtgactggacggcggcgtaggtgatccagacgtacggaccgctgggatctttcttgtcggctttcagcgcttcgacaatcgctttattcgccgggtcctggtcataacgttttggcatcgtcaccaacatgccttccgccgcaccgcccgcaatattggacagcgacgcgttacctacgccttccggccccataaattgcgttttcaggccattagcccgcgcctggcgtagcatctgccccatttccgggtagtagccgccgtaatacacaaagtcgatattctctttttgcaagcgggcaatcagggcggagaaatctttttcgccagcggtaataccatcaaaaaagacaatattggcattgccctgcttcaggccatcctgcacggagcgcgccagtccttcgccgtattgctgtttatcgtgaatgatagcgatgcgctgcggtttcaccgtttccaggatgtatttcgcggctgttggcccctgggaggagtccaggccggcggtacgcataatgtactgatagccgcgctgggtcagctccgggttagtcgcccccggggagatcatcagaataccttcatcttcatagatatcggatgctggctgagtagaagaagaacacaagtgaccaataacgtactgaataccgtcgttaacgattttgttggccaccgccaccgcctgttttggatcgcaggcatcatcgtactctacgccgaccagcttatcgcctttaatcccgcctttcgcgttgatgtctttaatggcctggcgcgcgccgttaaattccatatcgccccattgcgctaccgggccggacatcgccccgactatggcgactttaatatcatctgccattgccccctgcgagactgctaatgcaacaatccctgcgattattgttttcgctttccgtttcatgtgcctgtatccccattcgtgatgttatatgttttgttttttgctggttaaaaagcagactgtactttttataaatggtgcgctttttactgactcattaatgagttagcgcagcatttaaagcataataagattaaaatctctatttttcagtctattaagaaaagataatattctgcttttcgctatagataaacaaaaaaaagcatgcttgtcagcataaaataacggcatattaagcggaataattcactagcattcagggaattatgctgcctgttttccattctctaatgcttcaaactgtaattatcgttgttaaaaaattaataacctggtaaatgacacaaaaaagagaaagcatctggcctgcctgtttcggtacactgatcgcatcttttgaaatcgggacaagccgtcgatgaagctgaccattcttcgtttagaacactttagcgctcaggatcagatcgatctgggcaaaatctggccggaatattccgcctcctcattaagcgtagatgaaacgcaccggatttatgccgcgcggtttaatgagcgtttgttgggcgccgtaagagtgacgctgagcggaacgcagggcgcgctggattccttacgcgtgcgtgaaatcacccgtcgccgcggcgtcgggcaatacctggtagaagaagtcatccgcgataatcccaacgtctcgtcgtggtggatggcggatgtcggtgttgaagaccgcagcgtgatggccgcgtttatgcaggcgttaggttttaccgcccagcatgacggctgggagaagcgctaaaagaaagccggatggcgctgacgcttatccggcctacatgccgggagaaaagataaaaaccacctcgcaattttccaagaatttcgcgttgcaggcaggcggcaagttatgaaatccccgggagcttacataagtaagtgaccggggttgaataacgtagccaacgcacctgcagcgcgaaaggcgccagaaaatcacttagcgtctgtcgccgtaccattcgcatgccagtcaaacacgccgaactcaaatcctttcagatcgcctttctcatcccacgacagcggtcccattacggtgtcgaccgtggcgcctttcaggtatttggcgatttccgccggatcgtcggagtggttcaggcccgcctgcaacgattgcagcgcggcgtaggtggtccacacgaatgcgccgctaggatcttgtttcttggctttgatggcatccacaatcggtttgttcgccgggacctggtcgtagttcttcggtttggtgaccagtaagccttccgctgactctccggcgatgttagacagcgacacgttcgccaccccttccggccccataaactgggttttcagccctgcggcgcgggactggcgcaaaatctgccccatttccgggtgataaccgccgtagtagacaaagtcgatattctctttcttcaggcgcgcaaccagagtggagaaatctttttcgccagcggtgatgccgtcaaagaatacgacgttaacgccgcctttcttcagaccgtcctgcaccgcgcgcgccagcccttcgccgtactgctgcttatcgtggataatcgcgatgcgctgcggttttaccttctccagaatatactttgccgccgttggcccctggtcagagtccagaccggtggtgcgcaaaaccagcttatagccgcgcgcggtcagctccggcgcggtcgccgccggggttatcatcaggatgccttcgtcttcgtagatatcagacgctggctgtgtggaagaggaacataagtgaccgataacatacttgatgccgtcgttcaccactttgttagcgacagctaccgcctgtttcgggtcgcaggcgtcgtcatatttcaccgcgacgagcttatcgcctttaataccgcctttcgcattgatatcggcaattgcctgctccgcaccggtaaattcctggtcgccatactgcgccaccggaccggacatcgcgccgacaaccgcgactttaatgtcgtcggcgaatgccatatggcttaatgacagggcgatacatcctgccaataacgttttacccttcatattcatcctgataatccccattattctggttgttacgtgtgttgtggtgttattgttcagcactttatttcgattattggctagctacccgtgctttagcagcatactctgctaaaacatacccgatttttattattttggaatagctaaatttacatccagataacagatttgtgtcggtgggggagaggaagggtccgtaggcccgataagcgaagcgccatcgggcaaacgtattgccggatggcagcgtaaacgccttatccagcctacaaaaaacaaaacccccgaattcacattcgagggttcattggcaattcgcgaagattacgcttcgatcgcagcgcgaagctttttcatggcgttcttttcaagctggcgcacacgctcagcggagacgccgtaacgatcggccagctcctgcaacgtagacttattgtcttcgtccagccagcgagcgcggataatatcctggctacgctcgtcgagcccctgcatcgcgtcggtcagtcggttggcggcctgctcttcccagttatcgtcttcaatgccgtcggcaaagttagacgatttatcctgcagatacagcaccggcgccattggctggctgtcggactcatcgtccgaagacatgtcaaacgtcatgtcctgcgccgccatacgcgactccatctcacgcacgtctttactggaaacacccagttcgcgcgccaccatttcaacctcatcctgattaaaccagcccagacgctgcttggttttacgcagattaaagaacagcttacgctgcgctttcgtggttgcaactttaacgatacgccagttacgcagcacgtattcgtgaatttctgctttaatccagtgtacggcgaaagaaaccaggcgcacgcctacttccgggttaaaacgacgtacggctttcatcaggccgatgttgccttcctggatcaaatccgcctgcggcagaccatagcccgcatagttacgagcaatatgaacaacaaagcgcaggtgagacaggatcagcgttttagctgcttccagatcgccctggtaatgcagcctttcagccaatgcccgctcctcgtcagccgataacatcggccacgcgttcgccgcccggatataagattccaggttgccaacaggggctaaagctaaattttgcatttctttggtcattcaaatcctctcaatcagtattgcctggcaccgtcagcgagcaacaaccgtgccaaagccgatgagcaacgagaatatcacccactcttttatcagacagtgattttatccacaagttcaatgtaacactgtgcataatttgcacaaatcttgtgacataaagatgacgcgcggggaagagacaacagggactctttccctgcgaacggaagcccattgcagggaaagattataccacgattttatcaatcgggagtaaagtgacgtaaatgttgcaccgtggccagccaggcggcgatccagccaatcatggaacagaccagcagcagcaacaggcactcatcgaacgataagccattgagatcaaacttcgtgccgaagacctgcgccacttcagtcaccgccgatgataaacgcatcaccaaaatttcagacaatatcagtgacagaaacgcgccggaaaaaccgagcaacgcgccgccatagaggaacggacgcaggataaagccatcggtcgcgccaatcagcttttgcacgttaatggtgtcgcgacgggcaaaaatgctcaggcgcacgctgttgccgataacgaggaagaccgccgcgaccatcagcacgccgatcatcgccgatacgcggcccaccagcccggtgagcgccgccaggcgcgcaaaccagctatcatccatgcggacttcgtcaatgccgttaatctgcgagatacggtcgcgcagcgtattaagcgaggcggtactttgaaagtccagcttggggatcaccaccgccaccgccggtagcgggttctcttccagcatatccagcgcgccgccaaaacccgaccagttgcggaattctcccagcgcgtcctcacgggacaggtagttgaccttctcaacgccctgctcggcctgaagctgcccaacaacccgcgccgccgcgtcatcatccagcgttttttgcagataaacggtgatctgcggcgacggataatactgagtcgccgcctggttgacgttcttatagaccatgtaacagacgctgggcagcgtcagggagatggcgatcaccatcaccgtcagaaacgtcgccagcggtttgcttttcagatcttgcagcgcgccgtgccaggcatagcgcacctgctcattaaagacgttcgttttacgtgagttcggtttcggcgtcggcttctggcgtcctggcgcgttgcgcccgccgcctgttccgccgcgagacttacgcagtcgatccagccgtccgccgaactgcctgatttggttaatcgcgtcgcgcctattcattggccaggcctccatgcagatgtccatcgctcaggacgagctgcctataggaacgacgggagataagtccaatatcgtgcgtagccatcagtaccgtcacccctacgcggttaaactcttcaaacagacgtaaaatcccttccgacaacgcgtcgtccaagttcccggtcggttcatccgccagcaataccgctggcttattgaccaccgcgcgggcgatgcccacgcgctgctgttcgcctccggagagttgaatcgggaagtttctcgctttgtccagtagtccaaccttatccagcgccgccgacacacgacgacggatatcatcgccgctggcgccggcaatgattaacggtatcgccacattgtcatagaccgtgcgatccatcagcagatggtgatcctggaaaatcatcccaatctggcggcgcaaaaacggcacttcgcggtttttcaagcgcgtaatatcatgcccgctgaagaagattttgccggcgctgggccgctcaatcccacagattagcttcagcagggtacttttccccgcgccggagtggccggtcagaaacgccatctcgcctggccgcatatggaatgtcactccctgcagcgcttgtctcccgccgagataggccttgctgacatgttcaaagcgaatcattgttaatcctctcgggcaaaaagtgcctcaataaaatcgtccgccttaaacggacgcaaatcctcgatacgttcgcccacgccaatgtaacggataggaatgccaaactggtcagctaccgagaaaatcaccccgcctttcgccgtaccgtccagcttggtcagggtaataccggttaagcctaccgcttcatggaacagtttggcctggcttaccgcgttctgtccggtgctggcgtcaatggtcagcataacttcatgtggcgcttcttcgtccagctttttcatgacgcgaacgatttttttcagctcttccatcaggtgcgacttgttctgcagacgccctgccgtatcggcaattaacacatccacattacgcgccttcgcggcctggatagcgtcaaaaatcaccgaggcggagtccgcgccggtatgctgggcgataaccggaatattgttacgctgtccccagacctgtagctgttcgaccgccgccgcgcggaaagtatcccccgccgccagcatcactgatttaccctgctgctcaaactggcgcgccagtttaccgatagtggtggttttacccacgccgttcacgccaaccatcagaataacaaaaggcgttttaccttcaatattaagcggttcgtctaccttcgccagaatctcgcccatctcgtctttcaacagaccatacagcgcctcggcatctttaagctgtttgcggctggcgccttccgtcagattagcgataatcttacgcgtggtttccaccccgacatcagcgatgagcaactgctcttccagctcctcgaacaaatcatcgtcgattttcttgccgcggaacagactgataaatccggaaccgagattttctttggttttcagcagactgcgtttcaggcgggcaaagaaaccttctttagtcggtttttcctgttcctgaacgatcgcttccaccggcgcgtcttcttccgccggcggaacaaccatcaccgcctcttccgccgcctgagcggccagcgcctgcgcttccagctcttcgtcggtgaatttcgccgcgttttcgccctcttcttctaccgcggcaatgacctctacggtttccgcttcggcctgccactcttccggcgagatagcctcgtctttgacctcttccggcagcggcaattcctcgcgttccactgcgatctgcggcgctgccgtctcaatggccgccgcgggctccggctctaccggctgcggtttttcgctctcctgaactttctcagtaacgtccaccacctcttccgcaaaggcttctgtttctgctttgctgtgcgcgggcgtttgcgcgtctacgtctgccgccgtttcaacagggggctcaaccggtcgttgttcctcaacaatctgctgttcttcggtctgttcctgcttctgctctttatcaccgaagcccaaccaggaaaagaagccacgttttttctgttttgccatctgcgactacacccctcgcggcgctatatacatggaagctaaaaaaatgatgaaatagtctatcacttaacttaattcacatcaccgcctggaataacttgcaacaggcggttcgagcaagagaaatgaaaaaaccgactcactctggcagcggccaaatccgcattattggcgggcaatggcgtggccgtaaattaccggttccggacagcccgggtctgcgtcccaccaccgatcgcgtgcgcgaaacgttatttaactggctggctccggtaatggtagacgcccattgtctggattgctttgccggcagcggcgcgctgggtctggaagcgctatcacgttatgcggcccaggcaacgttactggaaatggatcgcgccgtatcgcagcagttgcaaaaaaatctggcgacgctgaaagccaacaatgctcgcgtcgtcaataccaatactctgaccttcctcagccagccggggacgccgcatcacgtcgtctttgtcgacccgccgtttcgtaaagggctgctggaagagacgttacaattgctggaaacccagggatggctggccgacgacgcgctaatctacgtagaaagcgaggtggaaaacggtctgccgcccgttccggcgaactgggcattgtatcgagaaaaggtggccggacaggtcgcttatcgtctgtatcagcgcgacgcgcaaggagaaaatgatgttgattaatctgggccgcttattaatgctcttcgtgtgggcatttttgattcttaatctggtgcatcccttcccgcgcccgctcaatatcttcgtcaacgtggcgttggtgttcatggcgctgatgcacggtatgcaactggcgctgctgaaatcaacgataccgaaagcgggtccgcagatgacgacgggagagaaaatccgcattttcctgttcggcgtgtttgagctgctggtctggcagaagaagtttaagaacaaaaaataacgtttgctgccggatgacggtttattcgttatccggggtacggctaacaaacccgacgaaccgcgttcccttatagctcagcgtaccttgatcgcccaccgtcaaagcgtggtactgctgcgcttgtaaacggaacgttttttccagaccgccattgagcggcttaaaactgacctcatagcgcatactggttcccgccgggatcacttcctgctggcgagagcgtcggtcattaaccggcttctcccgtttattgctgaccacgacctgcttttgctgtaacggcgccgcctcattagcggctttttcccgccgttgctgaacgaagcggaacgacgcggcaactacgattaatgcaatgattataatgaagaaaagcggtggcttactcatactgttaacctgtcagaaaatgcggaaataagcataccctgcccgttatagtgttgtcatctgaccgtcacggcctctacactgaataatagagccgcaagcataccgtttgcgaaaaaataacgaattcaaggaattaagatgctttggtcgtttatcgctgtctgcctgtccgcatggctgtatgtggacgcctcctatcgcgggccagcctggcaacgctgggtttttaagcccgtcacgttattactgttgctgttactggcctggcaagcgccgatgtttgacgccatcagttatcttgtgttggccggactgtgcgcctcgctggtcggcgatgcgttaacgctcttaccgcgtcaacgcctgctgtacgccgtcggggcatttttcttatcgcatctgctctacaccatttactttgccagccaaatgacgttgtcgttcttctggccgctgccgctggcgttactgatagtcggcgcgttgcttatcgccgttatctggacgcgactggaggagctacgctggccggtatgtacttttatcgccatgacgctggtcatggtctggctggcgggcgaactgtggttcttccgcccaacggcgccagccctttcggcctttaccggcgcgacgctgctgttcatcggcaatatcgtctggctgggtagccattaccgccgccgtttccgggcggataacgcgattgccgccgcctgctactttgcaggacacttcctgattgttcgctcgctgtacctgtaaataatagcgcttgactctggagtcgactccagagtgtatcctccggttaatgagaaaattatcatcaaccggaggacgttatgtcgacccctgataccgatggcaaaaaagtcccgccctttacctccttcagattagccccggcaatacagaaggccgatagctgctgctgcgaagaacattgcgcgtccagcgcgcctgtttctactgccatggcaggcacgcgctatacctggaaaatctccggcatggactgcgccgcctgcgcccgaaaagtggagaatgcggtacgccaaattcgcggcgtcaaccaggcgcaagtgctgttcgccaccgaaaagttagtggtcgatgccgacgccgaccttcgcgcgcaaattgaacacgccgtacagaaggcgggttataccttgcgtagtgaagattcgcgcgacgccgcacctgaatctcgtcttaaagagaacctgccgcttattacgctgatcattatgatggcgataagctgggggctggagcaatttaaccacccgttcggccaactggcctttatcgccaccaccctggtcggtctgtatcctattgcccgccaggcgctgcgactgatgaaaagcggcagttggttcgctattgaaacgctgatgagcgtcgccgccattggcgcgctgtttattggcgcgacggcggaggcggcaatggtattgctgctgttcctcatcggcgagcgcctggaaggatgggccgccagccgcgcccgtaaaggcgtcagcgcgttaatggcgcttaaaccggaaacggcgacccgtctgcgcgacggcgtacgggaagaggtcgctattaataccctgcgaccgggcgatattatcgaagtcgccgccggggggcgtttacccgccgacggtaaactggtttccggtttcgccagctttgatgaaagcgcgctcaccggcgagtctatcccggtggagcgcgcaacgggcgacaaagtcccggcaggcgcgaccagcgttgaccgtctcgtcaccctggaggtgctatctgaacctggcgccagcgcgattgaccgtatcctgacgctgattgaagaggcggaagagcgccgtgcgcccattgagcggtttattgaccgtttcagccgcatctatacgccagtcattatggtcatcgcgctgctggtgacgcttattccgccgctgatgttcgatggcggctggcaggagtggatttataaagggctgacgctgctgctcatcggttgcccgtgcgcgctggtgatctccacgcccgcggccattacctccgggctggcggcggcggcacggcgcggcgcattgattaaaggcggcgcagcgctggagcaactgggccgtatcacgcaggtcgcctttgataaaaccggtacgttgaccattggtaaaccacgggtgacggcgattcatccggcaagcggtatcagcgaagctgaactgttggcgctggcggcagccgtagaacaaggcgctacgcacccgctggcacaggctattgtccgcgaagcgcagacacgcgatctggcgatcccgacggcggaatcgcagcgaacgctggctggcaccgggattgaagcgcaggttaacggcgaacgtattctgatttgcgcggcgggaaaacagcctgcggcagcgtttgccgggcaaattagcgaactggaaaacgccgggcagacggtggttctggtgctgcgtaacgagaccgttgttggcgtcctcgccctccaggatacgttgcgtgacgatgcgcgcgacgccatccgcgatctgcatcagttaggcgttaacggcgtgattctgactggcgataacccacgggcggcggcagcgattgccggcgagctggatctggcgtttaaagccgggctactgccggaagacaaggtgcgggcagtcaccgcccttaaccaacaagcgccgctggccatggtgggcgacggcattaacgatgcgcccgcgatgaaagccgccagtatcggaattgctatgggcagcggtactgacgtcgcgctggaaacggctgacgccgcccttactcataaccgtctgcgcgggttagcgcagatgattacgctggcgcgcgctacccacgcgaatatccggcagaacatcaccattgcgctggggctgaaagctattttcctggtgacgacgctactgggttttaccgggctatggctggcaatcctggcggatacgggagccacggtattggtgaccgccaacgcgctacgtttgctgcgtaaaaactaatcttctcccgcccggcggcgtcgtgtcgccgggttatcccgcgatattcctttctttgttcatattattcacgcgaaaattatttattttctattacttatcaaaccattaatcagaaatagcgtgatttgatgtaaggttaatttttatccaaccgatattgatcataccgtctacaaaataaggaatgttaggcactatgaaaaatatcaaagtcatcaccggcgttatcgcgacgctgggcatatttagcgccttattgctggtgacaggaatactgttttattccgccgtcagcagcgatcggctgaatttccagaatgcgagcgcactgagttaccaacaacaggaactgggcggcagttttcagacattgatcgaaacccgcgtcaccattaaccgcgtggcgatacgcatgttaaaaaatcagcgcgatcccgcctcactggacgccatgaacacgctgttaaccaacgctggcgcgtcgctcaacgaagcggaaaaacatttcaacaactacgtgaactccgaagcgatcgcgggcaaagatccggcgttggatgcccaggccgaagccagctttaagcagatgtatgacgttttgcagcagtctatccactatcttaaagccgataattacgccgcctatggcaaccttgacgcgcaaaaagcgcaggatgacatggagcaggtatatgaccagtggctctctcaaaatgcgcaattaataaaattagccagcgatcagaatcagagcagctttacccagatgcaatggacgctggggataattctacttatcgtactcatcgtgctggcgtttatctggctggggctgcaacgcgttctactccgcccgctgcaacggattatggcgcacattcaaacgatcgccgacggcgatcttacccatgagatagaggctgaaggacgcagtgaaatgggccaactggccgccggtctcaaaacgatgcagcagtcgttaatccgtaccgtcagcgcggtgcgcgataacgcagactctatctatactggcgcaggcgaaatttccgccggcagcagcgacctctcttcccgtaccgaacagcaggcctcggcgctggaggagaccgccgccagcatggaacagttaaccgccacggtacggcaaaacaccgataacgcacgacaggcgacgggtctggcgaaaaccgcatcagaaaccgcgcgtaaaggaggacgcgtggtggataacgtagtgagcaccatgaacgatatcgccgaaagctcggaaaaaattgtggacatcaccagcgtgattgacggtatcgccttccagactaatatcctggcgctgaacgccgcggtagaagccgcccgcgccggcgaacaggggcgaggattcgcggtcgtggccggagaggtacgcacgttggccagccgtagcgcgcaggccgccaaagagatcaaagtactgattgaaaactccgtgtcgcgcattgataccggctctacgcaggtacgcgaagcgggagaaaccatgaaagagatcgtcaacgccgtgacccgcgtgaccgatattatgggcgaaatcgcctctgcctccgatgagcaaagcaaaggcattgagcaggtggcgcaggcggtatcggaaatggacagcgtgacgcagcaaaacgcctcgctggtagaagaatccgcagcagcggcggcggcgctggaagatcaggctaacgaacttcgtcaggcggtcgccgcgttccgcatccagaaacagcctcgtcgggaggcgtcgccaacgacgttaagcaaaggtttaacgccacagcccgccgcagaacaggcgaactgggaaagcttctaatcagaatagtatctgccgtgcagttaatgcgctttacgcaataaataacggtacggcagaccctccgtctcttgcgccagcaaatcgtgttccataaaggtacagaaccccggaatatcacgcgtcgtcgccggatcgtcggcgataatcagcaatgtttcgccagtttgcatgttgcgcaccgttttgcgcaccatcattaccggttcagggcaacgcagccccagggcgtcaagcgtatggtcaggggaggaaaacagatcgctcatcttcgtctcaatggtagaaaaacggcgatattttacgcccatcttcgtcagtaagccaggcaggttaacgattgcgtgaaaattagccattgcaatgccagcgcaaaacagtattatgcggcggttctttattgggttccctcaccccatccaacaaaaaggtcacaatatgactccgtttacacaatcacagcgcataaaagcgttgttctggctatcgctattccatttactggtgatcatttccagtaactatctggtgcagctccccatcactatttttggtttccacacgacctggggcgcgtttagttttccttttatttttctcgccaccgatcttaccgtgcgtatttttggcgcaccgctggcgcgccgcattatcttcgccgtcatgatccctgcgctgctggtgtcatatgtggtgtcatcgctgttctatatgggcgcctggcaaggtttcgccgcgctggcgaactttaatctgtttgtcgcccgtatcgccgccgccagctttatggcctacgcgctgggacagatccttgatgtccatgtgtttaaccgcctgcgccaaaatcgtcgctggtggctggcgccgaccgcttcaacgctgtttggcaatatcagcgatacccttgcctttttcttcattgcgttctggcgaagccccgatgcctttatggccgggcactggatggaaattgcgctggtggattattgctttaaggtgctcatcagcattattttcttcctgccgatgtacggcgttctactgaatatgttgctgaaaaagctggcagataaatctgaaatttccccattaccggcaagttaaaggttcgttttccgagttgtgataagatgagcgaatgagccgttatggccgtttatcgaaaggaagaagtcaatgcgcaatttggttaaatatgccggtattggcctgctggttatggggcttgcggcctgtgataacaacgatacaaaagcgtcggcagaaagcgccgccgcggaaagccaggcatccggtcagcccatcagcctgatggatggcaaactcagtttctcgctgccggcggatatgaccgatcaaagcggtaagctgggcacccaggcgaataatatgcacgtttattctgacccgacgggccagaaagcggtgattgttatcgtcggcgataataccgatgaagcgttgccggtgctggcaaaccgcctgcttgagcaacagcgtagccgcgacccgcagcttcaggtcgtcaccaataagtctattgagctcaaaggccatacgttgcaacaactggacagcattatctccgcgaagggccagacggcgtattcttccatcgtgctgggcaaagtggataaccaattgctgacgattcaggtcacgctgcctgcggacaatcagcaaaaagcgcaaaccacggctgaaaacatcatcaatacgttggttattaagtaacctttacgacgatgatgcggcctccggcagtgcagacggaggccgtttttttaagcgccaggtcagcaatagcgccatcgctaccagcccggccgccgccagataaatcaccggcacgcccgcccaggtcatcaccagccctgccagcggcccggtaacccccaaagacatatccataaagacggtataggtcgccagcgccgcaccctggttctgcggcggcacggctttgacggccaccacgcccagcgccggaaagaccagagaaaaacccatccccgtgagtaaaacgccgatttttgccatccacggcatggctgccgttcccaccagtaacagaccaataatctccacgccaaagcagatcatggcgacattcaacccgcctaaacgattgatgccgttagggaacagcaaacgcgtgccgacaaacgcgacgctaaataacgtgagcgcaaaagcggcgccatcccagcctttagcatcataaaataaggtaataaacgtcgcgatgacgccaaaccctgccgaggccagcgccaacgccataccatacagccagacacgccccagcaccgcgcgaaacggtagcggcttgcctttgttcgccttcaccgacggacgtggaagggctaacagtaccgccaacagcgccacgcccatcaccgttagcgccagtccctgtaacccgccccaggcataacacagcacgcccagcggcgcgcccatcgccattgcgccgtaggtgacgataccgttccaggagatgacccgaccaatatgcaacgacccgacgacgccgacgccccacagtgtcgaaccggtgccggcaaaactttgcccaatccctaaaatcacgcgacccagccccagtagcaacaaactgatcatcggccaggcgctggcgatatccgccagcaggtagccgagtccgcttaaaaaacagccgcataagccaaagacaacgatttttttcggccctaatacatccgcataccgcccggcatggggacggcttaacagagtggcgaagtattgcaggctgataataagccccgcccagaacgcgctgaatcccatcgcatcatgcacatagccgggcaagacggcgagcggcaggccgatggtcaggtagctggcaaagttaaacatcacaatggagacaatacgcagattgaggcgcaatccgtttagcgccggttcagcgacgggttcgggcatgagtatcaccgcatttttacaacatgttttcttttctatcatggcgcgcggtgaaaatcagtagtgagattcagattatcggtatcagggcagccgctacacttagaaaaaaacacaacaaggaaaacttcatggcaaccgctcaacccgacaaaacgggtatgcatattctgctgaaactggcctccctggttattattctcgccgggattcatgccgcggcggatattattgtacaactcttgctggcgctctttttcgccattgttcttaatccattagtgacctggtttattcgtcggggcgtgaagcgaccgctggcgattactatcgtggtggtcgtcatgctgatcgtgcttaccgcgctggtgggtgtgcttgccgcatcgcttaatgaatttatcgctatgctgcctaaatacagcaaggagctgacgcgtaaggtcttacaccttcaggagttaatgcccttcctgaatttacatatgtctccggaacgtatgctccgcgggatggattccgataaaatcatgctcttcaccacaacattaatgaccggcgtatcgggcgcgatggcaagcattgtgctgctggtgatgaccgtggtttttatgctgtttgaggtgcgtcacgtgccttataaattacgtttcgcgctaaacaatccacaaatccatattgccggcctgcaccgcgccctgaaaggcgtctcgcattatctggcgctgaaaacgctgctcagtttatggacgggcgcgattatctggctgggactggcgttaatgggtattcagtttgcgctaatgtggggcgtactggcctttttgctcaattacgttcctaatatcggctcggtgatttccgccgttccccccatgattcaggcgctgttatttaacggtttttacgagtgcgtactggtcggcgcgctctttttggtggtccatatggtgattggcaacattatggagccacgcatgatgggccatcgtctgggaatgtccacgctggtggtatttctttcgttattggtctggggatggctattaggcccggtcgggatgctcttgtccgttcctttgaccagcgtctgcaaaatctggatggaaaccactaaaggcggcagcaaactggcgatcttactggggccaggccgaccgaaaagccgtttaccgggatgaggcgacagatgctacaatctcctcttcttcataggcaacgttggtcctgatatgtaccaggtcgttctgggaaaagtgtcaacattaagcgcaggtcaattgcccgacgcgttaatcgctcaggcgccgcagggcgttcgccgggcaagctggctggccgggcgcgtgctgctttcccgtgcgctctcgccgctaccggagatggtgtatggcgaacagggtaaaccggctttttccgccggagcgccgctgtggtttaacctcagtcatagcggcgacactattgctctgttgcttagcgacgaaggtgaagtcggctgcgatattgaagtgatccgcccgcgcgataactggcgttcgctggcaaatgcggtattcagcctcggcgaacatgctgaaatggaagcggaacgtccggagcaacaactggcggcattctggcgtatctggacgcgtaaagaagccatcgtaaaacaacgcggcggcagcgcctggcaaatcgtcagcgtggacagcacgttgccctctgccttgtcggtcagccagtgtcagctcgatacgctcagtctggcagtctgtacccccacaccgtttacgctgacgccgcagacgataacgaaagcgctatgacacattaatttttccctctggcggcggacgtgtgttacaaaatgcggagcttcccatgcgccgacgcgccataccaaaaggtttaagtcagatgcaacgtgtcaccatcaccctcgatgacgatttactggaaacgctggacagcctgagccagcgacgcggctataacaatcgctccgaagcgatccgtgatattctgcgcggcgctctggcgcaggaggccactcaggaacacggcacacagggtttcgcggtactttcatatgtttatgaacatgagaaacgggatttagccagccgcatcgtctccacccagcatcatcatcatgatttatccgtcgccacgctgcacgtccatatcaaccacgatgactgtctggagatcgccgttctgaagggcgatatgggcgacgtacagcattttgccgatgatgttatcgcccagcgcggcgtgcgccacggccacttgcagtgtttgccgaaagaagactaacgccgggggcgcttcgcttgcccggcctacgttcgcacgtctgtcgtttgtaggccggatgaggcgcagccgccatccggcaataatgtttacgccattgtgccaatcgtttttctgaagcgtaacagcgctatcaggaagaacacgccgcctatcgccagcagggtcaggaactgcggccagacgatactcaaacctgcgccgcgataaagaatagcctgggcaaggctgacaaaatgcgtcgtcggcatggtcagcataatatcctgcaccgcctgcggcatactttcgcgcggcgtggaaccgccggagagcatttgtagcggcaacagcaccagaatcattaataaccccagctgcggcatcgaacgggcgatggtgcccataaaaatcccaattgaagtggtggcgaacaggctcagcgccacgcccaacataaacaatgggatcgatccttcaatcggtacgccaagtacgcctttcaccatcagcatcaaagacaaaccggaaaccaccagcacgaccagccccatcgaccacactttcgccatcatgatctcaaagggcgtgaccggcatcactaacagatgctctaccgtgccgtgttctcgctcgcggatcagcgccgacccggtcagcactatcgccagcatggtaatgttgttgataatcgccatcacgccgccaaaccacgccgggtcgagattcgggttaaagcgcatccgaatctccagcgacaccggctgaacgttatctccccgcgcgcgcgccacaaagctgttgacctcgccgctaataatattctggatataactgttgccggtaaacgcctggctcatgcgcgtcgcatcgacgttaacctgaatatcaggctgacgtccggccagcacatcacgctggaaattcggcggaatattgaccgcaaaggtatagcgtccggcatccagtccggcatccatttccgttgccgtaatcatctccggcggcagaaaccacgggcggtaaaaactattcacaatacggttcgacaactgcgactgatccatatcggcgatggcgataggggcaagatgcaacgaaccgggcaggacggtagcagaggagtaaaccgaaatcgtaaaggcgaagacgatcagcgccagcatcgctttgtcgcccagcagactgcgcagttctttgacgccgaggttataaatattacgtaatccgcgcattacccctcctgttttttcagcagcagaatgctcagacccatcaccaccgggacggcaatcagtaacggcataaataacggccagagatcggacagatccaacgctttggaaaacgtcccgcgcgcgatcgtcagaaaatgactggtcgggtagatctcgccgatccatcttcccggtccttccagcgaagccaccggatcgatcatgccggaaaattgtgttgccggaatgagggtaataatcgacgtcccaaaaatagcggcgatttggctcttcataaacgtggagatcagcagccccagaccggtggcgatgatgacataaagcagcgccgcgagggtaagcgtgagaaagctgcctttcagcggcacgccgaacacaaagaccgacagcgcgcacagtagcaagaagttcagcatacccagcgcgatatacggcagttgtttacccagcaaaaattcgctgcgcgtcgtcggcgttacgtacagattaatcatcgaccccagctctttctcccgcaccacgctcagggcgctaagcattgacgggatcatcatgagcagcagcggaatgaccgccggaacgatagcgggcagacttttcacatccgggttatagcgatagcgcgtttcaatattgagcagcccgacctgtttaaccgggttcggctgacgacttgccgcctcctgcagccagctttggtgcatcgcctgaacgtaccccttcaccgtctcggcgcggctgggcatggcgccatccacccagacgccaatctgcgctggcgtaccgcgagcaatatcgcggccaaaattaggcgggatctcaatggcaaccgccagctctcccgaacgcatccgccggtcaagctcgtcatagctggcgagcggcggctgttcgataaaatagcgggatcccgccagattgagcgaccatgcctgactactgacggtctggtcacgatcgaggacggcaaaacgcaggttctccacgtccatactgatgccatagcccataatcagcatcagaattaccgttcccagcagcgccagcgtcgagcgtaccggatcgcggcgtagctccagcgcttcgcggcgactgtagctgaacaaacgccggaagctcaatccctgccgcgacggtttacctgacgcggcgggcgtctgggatggcggtattggggtttcaggcgccgctcccgcagcttcctgtagccaggaaataaacgccgcctccagattggccgcgccccgctgttgcaccaattcctgcggcgtaccgctggcgagcactttaccggcgtgcatcaatgacattcggtcgcaacgttccgcttcgttcataaaatgggtcgagataaaaatcgtcaccttatcctgacgcgaaagatcgaccataagctgccagaacatatccctggcgaccggatcaacgccggacgttggctcatcaagaatcagcatttccgggcgatggatcaccgctaccgccagcgataaacgctggcggataccgagcggcaacgaagcggggagcgtatcttccacctccgttagcataaagcgttcgatcatctgcgcgacgcgcgccgggatctccgctggcggaatatgaaacaggcgggcatgaagttccagattctgccgcacggtgagttcgttatagagcgaaaaagcctgcgacatatacccgacccggcgacgggtgtcgatgtcgttcgggtctaccggctggccaaatagccaggcctggccttcgctggcgggaagcagaccggtcagcattttcatggtggtcgatttgccgcaaccgtttgaaccgaggaagccaaaaatctcgccgcgcggaatacggaaattaacatggtcaaccgcgacgaacttaccgaagcgcatggtcagatctttcgcctcaatggcaatctcttcctgctcagcgtgatacggcgggatcaccaccggcttatgcgcctggcgctgcgcttctggcaacagggcgataaacgcctgttccagcgtcgcgctatgggtttttgcccgcagttgctgcgcgctgccggttgccagtatctcgcccgcattcatcgccaccagccagtcaaaacgctccgcctcttccatataggccgttgcgaccaacacgctcatgttggtctggcgctggcggatactgtcgattaagtcccagaactgagcgcgggagagcgggtccacgccggtggtaggctcatcaagaatcagcaattccgggtcatgaatcagagcacagcacaaccccagcttttgtttcatcccaccggacagcttcccggcaggacggtcacgaaacggcgccaggccggtgctgttcagcagctcggtaatacgcgcttcgcgttcagctttgtcatgaccaaagagacgagcgaaaaaatcgacgttctcataaaccgataacgtgtgataaaggtttttccccagcccctgcggcatccaggcgatgcgcggacagacgtcgcggcgatgtttcgcatcgcgcatatcgccgcccaggacgataacgttcccttgctcaatcacccgcgcgccagaaatcagcgacagcaggctcgacttacccaccccgtccggaccaatcagcccgaccatactacgggcgggaatgtccagcgtgatattgttcagcgcgaccgtttttccgtaatgctggctcaccccctcaagctgcgccacgggaggaacaggcaccagcgtcagcgacgtcattgcgacagcctcacgcttagagcgtcaggccagggcacgcgctcatccagacgaacccaggccattcccggcaaaccggttttgacatattccagatgctgtcgcagcagctctggcggaatacgcgctttgacgcggaacatcagcttcagccgttcatcgtgggtttccacggttttgggcgtgaactgcgccacgctggcgacaaaactgatcgtcgccggaatacgcagatccggcgcggcgtccagcaccagtcgcgcttcgccgccgatcttcaacaacccagcctgttcggtcggcaggaaaaatgtcatataaacgtcgctgagatcgaccatgttcaacacccggccgccagccgataacacttcgcccggctccgcaacgcggtactgcacgcgtccatcgcgcggcgcttttaattcgctgtcgtcgatgtcggcgacaatacgccgctcggtcgcctgcgccgcttccacgcgcgtttgcgcctggataatactggtacgcgccgcctcaatcgccgcttttgccgcagatacctgcgctttggcggtctccagggcggcgcgcgcgctttccgccgccgcgcgatcgtcatctaactgttgtacagataccgcgccacgctgcgacagcgaacgggaacgcacgtgacgtttagagacggagtccagctcagcttcccgctgtttgacgaccgactgcgcggcgcgcatttcactctggcgttgctccagcaaggcacgggcggcggcaaccgcgctttcggcctctttaatctgcgcaatcgcctccagccgctgctcctgcagcacgcgggtatccattttcgccagcacctcgccctgacgaacgaactgcccttccgaaacgaggatggtatcaatacgcccggcaatcttagtggcaatatccacttcggtggcttcaattctgccgttgctggcggcaaacccctccggtattcccgcagggcgcagcatccaccaggctatcgcggccaccgccacaagaatccccgctccccaccacaccagatgacgcttcattttgtccataatcgacccgccgtaatccctgttgtctaaccatgcgtgtcacaaagtccgccgggcgtgcgctcagcgggggtttccattcgggataagaatgaaaaaagaaaaggggccagacgacgaacagacgccgatgaagcgctcgccgtcaaagggagtgaatgatgtaggtacccggaaaagagggagtaatgttgtcatcatcagcgttcctggccgtaaatgaaacacgcatactcataactgctataaatcgatactaacacctctgtccgggatgtctattcgcttattgtttgtaatggtacttagcgttttgccgccaaatcctgcgcacaggcccaggcgctcgaccaggcccactggaagttatagccgcccaaccagccggtgacgtccatcacttcgccaataaaatagagacccggcacgcggcgcgcttccatagtccgcgatgatagttcgtttgtatccacgccgcccagcgtcacttccgctgtccgatagccttcggtgccgttaggctgcacttgccaggccgtaagcgtgtcaaccaacgcctgctggtcacgaacgttcaactgcctgagcgatacatccgggatctgccccaactgttgtaaacactccaccaaccgtttcggcagatgcatcgccagcgtgttcttcagactctggttcgggtgcgcgttacgctgttcattgagaacgtcttccagcgagagatccggcaataagttaatgctcactaactcgcccggttgccagtagctggaaatctgtaaaacggcggggccggacagcccacgatgggtaaaaagtaggttttcccgaaataccgtgccattgcgggcggtaatcacgcagggcacagagacgccagacagcgtctggagctgttctaacagcggcttatgtagcgtaaagggcaccagcccggcgcgcgtcggcaacactctgagaccaaactgttcggcgattttatagccaaacggcgatgcgccaagccccggcatcgacaggccgccgctggcaatcaccagcttttgcgtagtcaccgtctcgccgttcaacgccagtatgaaacccgactcatcacgctcgacgctcaatacctcgctacgcaggcgcatcgttacgccgcctttgtcgcactcggcaaccagcatatcgacaatgcgttgggcggaatcatcgcaaaaaagctgtcccagcgttttctcatgccaggctatcccatacctgtcgaccagatcgataaaatcccactgggtatagcgggctaacgctgatttacaaaaatgggggttctggctcaaatacgcagcaggctcaacataaagattagtaaagttgcagcgcccaccgccggacatgaggattttacgtcctggcttcttgccattatcgatgagcagcacgcggctacccgcctgtcctgcctgcgcggcgcaaaacatgcccgctgcgccagcgcctataataacggcatcaaacctttccacgtcgccttcctctctcaaattcgggcgggaattgtaaagtttcctcagtggtcgcaccagcgcgaaaagcgcctgaaaatggtatttatctgaaatatataagataattctttagtgatatcaaacaaagcacgaagtacatcaaaaaaagtctatatttcactttgcccgcgccgccaaagtcactgataatgcgccgcgttcatgtcctcaaaatggcgtaacgtcctatgctacatttgtttgctggcctggatttacataccgggcttttattattgcttgctctggcttttgtgctgttctacgaagcgattaacggcttccatgacacagccaatgcagtcgcaaccgtgatttacacccgtgcgatgcgttcgcagctggcggttgtcatggcggcggtgtttaacttttttggcgttttgctggggggtctcagcgtggcgtatgccattgtgcatatgctaccgacggatctcctgctcaacatgggttccgcgcacggcctcgctatggtcttttccatgttgctggcggcgattatctggaacctcggtacctggtatttcgggttgccggcgtccagttcccacacgctgattggcgccattatcggcatcggtttaaccaatgcgatgatgaccggcacgtcagtggtggatgcgcttaacatcccgaaagttatcaatattttcggttcactcattatctcccctattgtcggtctggtattcgccggcggtctgattttcttgctgcgccgctactggagcggtactaagaaacgcgcccgtatccacctgacgccagccgaacgtgaaaagaaagacggcaagaaaaagccgccgttctggacgcgtatcgcgctgatcctctccgctatcggcgtggcgttttcgcatggcgcgaacgatggtcagaaaggcattggcctggtcatgctggtgctgattggcgtcgcgcctgcgggtttcgtggtcaatatgaatgcctccagctacgaaatcacccgtacgcgcgatgctatcaacaatgtcgaaacgtactttgagcagcgtcctgacctgctgaaagccgtcaccggcgttgaccaactgattccctctccggaaccgggcgcgactgaaccgactgaattccactgccatccggctaacaccattaacgcgcttaaccgtgcgaaagggatgctggcaaacgtggaaagctacgacaagttaagcgttgaacagcgtagtcagttgcgtcgcattatgctgtgcatttccgacacgaccgacaaagtcgtgaaattgcctggcgtaagcagcgatgaccagcgcctgctgaaaaagctgaagaccgatatgttaagcaccattgagtatgcgccagtgtggatcattatggcagtggcgttggcgctgggtattggtacgatgatcggctggcgtcgcgtggcgaccactatcggcgagaaaattggtaaaaaaggcatgacgtatgcgcagggaatgtcggcgcagatgacggcggcagtctctatcggtcttgccagctacaccggtatgccagtttctaccactcacgtactctcctcttcagtggcgggaaccatggtcgttgatggcggcgggttgcagcgtaaaaccgtgaccagcattctgatggcctgggtatttacgttaccggcggcgattattctttccggcgtgctgtactggctttccctgaagattatttaagccaaatgggccggatagcgctgtcgctaatccggcctgtcaggatgaaacgacacaggcctgataggccgctataagcggcgtcatccggaggcttatctaatacgagcgggtcaggaaactggcccgctttttttattcagtgccaaatcatgagcgcaatcaagctcaccaccaccaaaccgcataacgcgctggtcagcagaaactggcggcgcacgcgttcacaacggcgaataaattcttcatcatgatgatcgcgatagcgctgagcgtagatataccataccaggcgcacctgtttgttgggctgaccatgcgtggtaaagaagccgccgccatcgacatattgatagagcaaaggatcgcaaccacgaagtaccactaacagtgcgcgtagcgatgagaaatagcgcgccatattaacaatgcaaacgacacataaagcccagaatagtgagacggtgcttatcatatctcctccccggcgacccgcccacggagttcctctccgggactaccgctccccgataccctgccagacaatcagtgaaagagtactacgaaagccgtccatattagcgctccgcattcgaacggctcttatacacattgtaggagatcagttaatttttttaccagaaggttaatcactatcaatgcaattccctagaaattttgtttaactaactggcaagcaaggcagattgacggattatcctggtcgctataatgtaaggatagttatggtaaacggctgagctagccccgcgcatagagttcgcaggacgcgggtgacgcggcggcataagaaacgccagtagctcaatggtcatcgacaacttatggaaggagtaacactatggcttataaacacattcttatcgcagttgatctctccccggaaagtaaagttctggttgaaaaagcggtctctatggcgcgcccctacaacgcgaaaatctccctcatccacgttgatgtgaactattctgacctgtacaccggtctgattgacgtcaatctgggcgatatgcagaaacgtatctccgaagaaacccaccacgcgctgaccgagctgtctaccaacgctggctaccctatcactgaaaccctgagcggtagcggcgatttgggccaggtgctggttgatgccatcaagaaatacgatatggatctggtcgtttgcggtcatcaccaggacttctggagcaaactgatgtcttctgcgcgccagctgatcaacaccgttcacgttgacatgctgattgtgccgctgcgcgacgaagaagagtaatacttgccgtgccggctggcggctaagaccgcgtctggtctatagtcaatcaggttggcctgaaccatcaggcaaattccggctatcaacaacaacgcccgcttatgtgggcgttttgtttatcccccttcttcgcagtactcagtacatcattccatcacaccaaacataattagtgtgatccactaattagtttgcgtatcatttgtataataacctattgatcaggctaataaccgcagtctatatcagggtaagtcttttcggcgcgttttgatatacgcgctcatacgtttcgggatggcattaaaaggcgaaggaatatgaatacaactgcacctacgggcttgctgcagcaacctcgtccattcttcatgatcttttttgtagaattatgggaacgatttggctattacggcgtccagggcatcctggcggtctttttcgttaaacaattgggtttttctcaggaacaggcctttattacctttggcgcttttgcagcactggtttatggcctgatctccatcggcggctatgttggcgaccatctgttagggactaaacgcaccctggtcctgggcgcaattgtgctggcgattggctattttatgaccggcatgtcgctattaaatcccgatctgatttttatcgcactgggtacgattgccgtgggcaacgggttatttaaagccaatcccgccagcctgctctctaaatgctatcagcctaaagatccccggctggatggcgctttcaccctgttttatatgtcgattaacatcggttctttgttatcgctatcgctggcgccggtgattgccgataaatttggctatgcggtgacctataatctgtgcggcgctggtttaattgttgcgcttctggtgtacttcgcctgccgtggcatggtgaaaaatatcggttctgaaccggatcataaaccgctacgttttcgcaatttgctgctggtactactcggcaccgtcgtcatgattttcctctgcgcctggctgatgcacaacgttaagattgccaatctggtgctcatcgtcctttctatcgtcgtcactattttcttctttcgcgaagcgtttcgtctggataaaaccggccgcaataaaatgttcgtggcgtttattctgatgattgaagccgtgctgttttacattctgtatgcgcagatgcctacctcgctgaacttctttgcgattaataacgtgcatcatgaaattcttggattcgccattaacccggtgagttttcaggcgctgaacccattctgggtggtcgtcgccagtccggtactggcagcgatttacacccggctgggtagcaaaggcaaagatctgactatgccgatgaagtttacgctcggcatgttcctctgcgcgctgggttttctgaccgccgccgccgccgggatgtggtttgccgatgcgcaaggattgacgtcgccgtggtttatcgtgctggtgtatctgttccagagtctgggcgagttgttgattagcgcgctggggctggcaatggtcgccgctctggtgccgcagcatctgatgggctttattctgggaatgtggttcctgacccaggccgccgccttcctgctcggcggttatgtggcgaccttcactgccgtaccggaaaacatcaccgatccgttgcagacgctgcccatttataccggcgtctttagcaaaattggtctggtaacgctggcggtcaccgtggtgatggccattatggtgccgtggttaaaccgaatgattaatacgccaggtaccgaacagtaatactcagtgccggatgcggcttacgccttatccagcctacaaataattgagaatcgtaggcccgataagcgtagctccatcgggcaatccgttactccgtcagaggggttccggcataaatatcaaaccgatgccctttggtgacgatggcgttgggcgtcgcgacatccgccagcggcggcgcataatcgggacgtttaaccaccacgcgtttggtcgccaactgacgcgccggttccagcagtccgtcggcgtctaaatccggccccaccaacgactgaaacacccgcatctctttcttcaccagcgcgcttttctgccggtgaggaaacatcggatcgaggtagaccacctgcgggcgcggcgtgatatcggtcaacgccgtcaggctggaagcatgaatcaactgcaaacgctcctgaagccagccgccaatgtccgcatcggcgtagccgcgcgtcagaccgtcatcgagcagcgcggcaaccaccgggttacgctccagcatccgcacgcggcaaccgacggacgccagcacaaacgcatcgcgccccagtccggccgtggcatcaaccacatccggcaggtaatcgcctttgataccgacggctttcgccaccgcttcgccgcgcccgccgccgaacttgcgccggtgcgccatcgcgccgccgacaaaatcgacgaaaataccgccgagcttcggttcgtcgcgcttgcgcagctccagatgttgcggcgtcatcaccagcgccatcgggttgtcttcgtcatgctccagtccccagcgggcagccagaacagataaggcgccgtctgtggcgcccgtttcatccattaagcagatttgcacgtaaaatcagcctttaatcccgtaatgctccagcatcgcgtccagttgtggttcacggccacggaagcgtttaaagagttccatcggctcttcagaaccaccgcgagtcaggatgttatcaaggaacgactgaccggtctcacggttgaaaatgccttcctcctcaaagcgggaataagcgtccgccgccagtacgtcggcccacagatagctgtagtagcctgccgcatagccgccagcaaagatatggctgaacgcatgtggaaagcgaccccatgtcggtgacggcaccacggcgacctgttttttaatttcaaagagcgtctcaagaattttcgctccttgctgtggattaaattccgcatgcagacggaaatcaaacagaccgaactccagctgacgcagaataaacagcgccgcctgatagtttttcgccgccagcattttatccagcagttccttcggcagcggttcgccggtctcatagtggccggagataaacgccagcgcttccggctcccagcaccagttttccataaactgacttggcagttcgaccgcgtcccacggcacgccgctgataccggagaccccggcggtctcaatgcgggtcagcatatgatgcaggccatgaccaaactcgtggaacagggtgatcacttcgtcatgggtaaacagagcgggtttaccgttcaccggacggttgaaattacaggtcagataagcgaccggcttttgcaatgtgccgtccgctttacgcatctggccgacacagtcgtccatccacgccccgccgcgtttgtgttcgcgcgcgtacaggtcaaggtagaagctgccgcgcagctcgttattttcgtcatacagttcaaagaaacgcacttccgggtgccagacatcaacgtcagtacgctctttggcagtgatgccgtaaatacgtttcaccacttcaaacaggccattcacggctttgttttccgggaagtacggacgtagctgctcatcgctgatgctgtacaggtgctgtttttgcttttcactgtagtacgcgatatcccacggttgcagctcctcaacgccaaattcggctttggcgaaggcgcgcagctgggccagctctttttccccctgcggacgggcgcgtttcgccaaatcggttaagaaatcgagcacctgctgcggattttccgccattttggtggccagcgattcatgggcataattttcgaagcccagcagttgcgccagttcatggcgcagcgcaagaatttcttccatcaccgggctgttatcccacttaccggcgttcggcccctgatcggaggcgcgagtggaataggcgcgatacatctcttcgcgcaacgcctggttgtcgcagtaggtcatgaccggcagatagctcgggatatccagggtcagcaggtaaccttcctgctctttggcttccgcctgggctttagctgccgccagagcgctttccggcattcccgccagctcggcttcatcggtgatgagcttcgtccagcccatagtggcatcgagcacattattgctgtactggttgcccagctcagacaggcgagtggcgatttcgccgtaacgctgctgtttctctttcggcaggccgatgccggacagttcaaaatcacgcagcgcgttatcaaccgctttcttctgcgcggtattcagagtggcgtaatgatcgccgtcgcgcaggtcgcggtacgcgttgtacaacccttcatgctggccaacccaggtgctgtattccgacagcagcggcagcgtctgttcgtaggcttcacgcagctccggactatttttcaccgagtttaagtggctaattggcgagaaaatacgccccagaacatcgtcggcttccgccaacggctggcagaggttttcccagctatacggcgcgccatgcgccacaacgccttctaccgccgcccggcaatcggccaacgctttggtgaccgcaggcaccacatgctccggtttaattgcagaaaaaggcggcagtgaaaaagacgttagtaatggattggtcatatgcgcagtcctgtagaagaaggtgagtggagcgcgcttttggcgctctcgcgatgagatctagaatgggggatagtaaggggaatttcaatgatggacagcgtacagacgtgggtatcgctgcaataagccgcccctttaacatcatcccggcttacgttttataagccgggtgacaacgtcagcgcgtttttctcgccatctcgtaagcagcggacagatccagacgctgccagaactgttgatcctcggtctcgcccgacaacggatatcctgccggtaacgccgtctcttccattaacgcctgacgctgcgctggcgacaggttcggcagcgctgtctgtagcagaacatcggcgccttttggtattttcaacggctgatgctcgcctttctgttgcggcaggttataagtcatggtgaagcggtagaaggtatgcatggccggatcgcggtacggatcgtcttttccggtcgatgccgcgcattcgacaatcgtcgtaccgcactctttcaccagcgcctcacgcagttgagcgcgagcttcgttgaataacgtacggtaatacggatcgttaagataatgcgcgacattacgctgcgcgaccatccgcgcgcccatcacatccagcggatagtgtacgccaaggaccaggcgagaatagccataacgcgcgccacgaatcaccagcgcatcaaagcgttccgggatcatttccgccatcaacagcgcatccgtataaccggtattcgtgtgtccgctggggaaagcaccgccacctgcggtataaggatgaccatcttttaccaccacatcatccggcgtcaaatggatagtattacccggcacctggtaaggacgcgggtaatgaaaatattttttcgccgcgccggtgctgacttccgaggctttaatcaacgccgccgctttgcccaactcacctttatcataagcggcgagaaatgcccgccccagccgcggccccattgcgtcgctcaggaaatagagatactccacgctttccgcatccgccagcgcctggtgacgggtattaacatcggcatcgtgattaatcgccgtcaccgtcgccagattgtctttcaatactgcttccggcaatgtattgaaggcggaaagtagggtaatccccatctgttgattctcagtagtatgaaaatcataaccgctagcctgtaaccaggcattatccgcctggatggaattctgtcgcatctgagccagggcgtcgcgagtcaacgcggcggtatcgccttgtaatgccttacgcaactgtgtcagccattgagcctcaaggtcattaaaggcgacgctcgccgagtcgggcgtcacgcttttcgctatcgactccgcctgggacaggggaatatctttcgccagtgccggcatcgccagcgccagagatgacgccagtacagtaatgtgtagtttcattatggttcctttcattaaaaataacgccaggtcaaaactactaccttgcccacaggcgatgctggcctgcgcagttgacggtttgatgatacgaacacgtcttgcaatactttcacaacgcgcgaaacaacatggcggtactggggtaatctctacggatctgcggtaaactatcggctaacttgtttacttcccggaatatctgcatccatgctcagttatcgtcacagctttcacgctggcaaccacgccgacgtccttaaacataccgttcagagcctgatcatcgagtcgctaaaagagaaagaaaaaccgtttctctatctggacacgcacgcgggcgcggggcgttatcagttgggcagcgaacatgctgaacgtaccggagagtatctggaaggcatcgcccgtatctggcagcaggacgatctgcccgccgaactggaaccgtatattagcgtcgtaaaacatttcaaccgcagcgggcagttacgctactatccgggctctccgttaatcgcccgccagttgctgcgtgagcaggacagtctgcaactcacggaattgcatcccagcgacttcccactgttgcgcgcggagtttcaaaaagacaaccgcgcccgcgtggaacgcgctgacggctatcagcaactgaaagccaaattgccgccggtttcccgccgcggtctgatcctcattgacccgccttatgaaatgaaaaccgactaccaggcggtagtcagcggcatcagcgagggttataaacgtttcgccaccgggacatacgcgctatggtatccggtggtgctccgccagcaaattaagcgcatgattcatgagctggaggccaccggcatccgtaaaatcctgcaaattgagctggcgatccgcccggacagcgatcagcgcgggatgacggcgtccggtatgatcgtggttaacccgccgtggaaactggagcagcagatgaacaacgtgctaccgtggctgcacagcaggttggcgccaaacggtcacggacacacttcggtaagctggatcgtgccggagtaatcacagccatcggtggaacctttcaccttcaggtatacaatcgcgaatattttggcgggtagcgcagaatctatccgtccgacaacgaacataaaggagcggtcatgaccaaacactatgattacatcgctatcggcggcggcagcggcggtatcgcctcgattaaccgcgccgctatgtacggccagaaatgcgcgctcatcgaagccaaagagctgggcggcacctgtgttaacgtgggctgcgtgccgaagaaagtgatgtggcatgccgcgcagattcgtgaagcgattcatctgtatggcccggactacggttttgacaccacgattaatcagttcgactggagcaagctgattgccagccgtaccgcgtatattgaccgcatccatacttcatacgacaacgtgctgggcaaaaataacgtggatgtgattaaaggctttgcccgctttgtcgatgccaaaaccattgaagtgaacggcgaaaccatcaccgccgaccatattttgatcgctaccggcggccgtccgagccatcctgagattccaggcgtggaatacggcattgattccgacggtttctttgcgctatctgccttgccggagcgcgtcgcggtggtaggcgcaggttatatcgccgttgaactggctggcgttatcaacgcgctgggggcgaaaacgcatctgtttgtccgtaaacatgcgccgctgcgcagttttgacccgatgattagcgaaacgctggttgaggtgatgaacgccgaaggcccgcaactgcatactcacgccgtgccgaaagcggtggtgaaaaacgccgacggcagtctgactctggaactggaagatggccgcagtgaaaccgttgattgcctgatctgggccattggtcgcgaaccgtcgaccgacaatattaatctggcggcagcgggcgtgaaaaccaatgaaaaaggttacatcattgtcgataaattccagaataccaacgttgaaggcatttacgccgttggcgacaatactggcgcggtagaactaacgccagtcgccgtcgccgccggtcgccgtctctccgagcgcctgtttaacaacaagccggaagagcatctggactacagcaacatcccgaccgtggtctttagccatccgcctatcggcaccgtcgggttaagcgagccgcaggcgcgcgagcagtacggcgacgagcaggtgaaagtctataaatcatcgtttaccgctatgtataccgcggtaacgacacaccgccagccgtgccgtatgaagctggtctgcgtcgggccggaagaaaaaattgtgggtatccacggtatcggcttcggcatggatgaaatgttgcagggcttcgcagtggcgctgaagatgggcgctaccaagaaagacttcgataataccgtcgctattcacccgaccgcatcggaagagtttgtgaccatgcgttaatatcttgtgcgcccatcttcaagggtgggcgcacaagcctgcatgattaatacgtactgaaataactctggatcagttccggattacgcgtctgagttaatgccgtcatcagcaagactcgcgccttcgccgggttgagcgagtcagacaccagccctggctgccctttatccaacggtacgacgccgtttccggtgcgggaagcgcgcaccacgataatcccggctttctccgcttttttaatccccgcgtcgctgcgtaccgagaccgaacctgcgccggttccggcataaataataccgtccgcgtgatgggcgatcgccgcatcatacatatattccgggtcgtcctgatagccgtaaataatcaccacattgggtaattttttgatattacgtacgtcaaaaacagatcgcagggtatgaattttttccacccgcgtttcgaactgtggctgaccattaacgatgacccccagatagccctcttccggcgctttaaaggtatccagagtcgtggcattagttttcgtcacaaagcgcgccgaaccaatacgatcgtttaaaaccaccatcacaccgcgtcccttcgcattcgggtcagcagccaccgtgaccgcttccagcaggttcattgcgccatcggcgctgattgccgacgcgggccgcattgcagcggtaaacaccaccggtttgtcgcttttcacggtcaaattaagaaagtaggcggtttcatcgagcgtgtcagtgccatgagtaataaccacaccgtcaacatcgtcccgcgccaataacgcattcaccttctgtgaaagtttcaggatgatatcgctggtcatattttcgctaccaatattcgccacctgctcgccgtcaacgcgagcgatattattcatttccggcacggcatttattaatgtttgcacgccaagttcaccagatttatatccggcggtttgcgtattattggctgccgtcccggcgatagtaccacctgtcgcgagaataacaatatgcggtagtgacgttgtgctaaatacacagtggctgatgagcagcaacacggtggccatgaaaactctaattttcattttcttcctctgaattaaaaataataagtggcgtgtgctataaaaacatgaataacaatcaggccagaaccatttttcctattaacagcccgacaatgaccgagacaatcacgttaactaatcccggacgcataaaactatggttaagcacatatttgccaatacgcgtcgtaccggtatcgtcaaacgccagcgccgccagacactgccccgccaccggaataaagaaatagccgttaacggcaggccaggagccgattaatgcataagcgggcaaccctaacgccagccccagcggcaacagaattaacgtcgttgccgcctggctgctgaccatagcggacacaaaaaacatcataatggcgataagccaggtatgctgttgcaatagagtttgcacttctgccttaatcaacgcgatatgaccattcacgaacgtctcactcatccaggccaggccgaaggcgcagacaatcgccagcgcgcccgcccgaaataccgtaccgctgataatttgatcgacctgcggtcggcataacaacacaatcaggcaggcaaaagagagcatcgtaatctggatagcggcggacatcgaaagcggttgtagccctttcgctgtttccaccatgggccgcagcgccggaatcagtcctaacagaacgataacgatcgcactggtcagaaataacgccaccgacaatttggcgcgcgaagtgaccaccgtatttttactttctttctgcgcaggtttaattaacccttcagcaagccgacgttgatattccggatcgtcttttaactcttttcctttattaaaggtcgctattgcccccatcgctacgccgattaacgtggcgggcacgcaaatcatcataatggttgaaatagagacgcccaacggcgccattaaaccaatcatcgccgccatggcggcagatataggactggcggtgatcgcctgttgcgatgcgataacggaaatagataaaggacgttccggtcgaatacctgaatcccgtgcgacttcagaaataaccggtagcaagctataaacgacatgccccgttcctgacataaaagtgaagatataacagataaacggcgctaataacgtaatgtaacgcgggtggcgacgcagaattttttccgccagtttgaccagtaaatccagcccgccggaggcctgtaaagaagcggccgccaggacaacagaaagaataatcagaataacatcaatcggtggcgtagaaggcgtcaggccaaaaataaaaaccatcacgccgacgcctaacccgccgaccatccctaaaaatacgccgccgatcctggcgcctatcatcagggccacaaggataaaacataattccgtccaaaacatacttcctcctgggttatctggagtgagtgtcgctttacattgagggacgtaacctattgtgcaaacggtttaccaaaaccaaatgcgccgtaatgagataacacctgcgccgccgatttcccgccctgccgcatggcgcgtaacacgctttctttatcgggttccgccatacccgattgcaaaatggaaagcaaaaaaccggttaagaaggcgtcgcctgcgcccagcgtatcgacaggttcgatataagcaggttgccactccagataatccgcgccggaaaaataataaactttttcatgcccgcaggtggcaataatatgccgacagccataacgataaagtttattgagttttactttgatttcatctggcgataacccgctacaggagataaatccgtaatctacccacgggcataccttttcaaaatagtcgtctgtaccgcgcccggaaaaatcaaaagagagtaagacggtttgttgtttaattttctccagttccgattccaggtggccgttaatactggaatggactaaggtaaattgtgatatatagcgaagatcgtcgtcagacagactaaaaggatgttcccgcaatacgccgtttttgttgctggcgacaaattgccgatcgccatgcgagagacggatacaggcatacccattttcgccggtataatggcggctgtgagagatgtctatctgtagctggtgtaatacatcctgtacgtgctgcgcggcgtcgtcattgccaaacgcccccataaacgcgctggggatgtctgctaatttcgcatagacagcaaaatttaatgcattaccgccggggtacatgatgccggaatgcaggtatttatcgacaacgttgtcgccaatacccaatacgctgatgctcatcattattccttgtttgtctttacaataaaaagcgtccctgcttttttatccatcctgatgtaattaatattccactttccacatatagcggcgcgtcgttaacggatgctgacgcgcctcagctaacgcccgattgtaaacgggataaacgttattaaagagagagtggttaaagtaatcaataaccgtggttttaatggtcgatagccccagttctttcgcatcgacaacttcaatccggcggccatattttttcaggaagtttaacgcgcgttcatccaccgcccgcgtattgccctcggaaaactggaagaagaaaggcgtattcgcatcggtaatttcaaacggcccgtggaaaaactcaccgctatgaatacaggcggaatgtatccattgcatttccataaagatgcagatgctctgtaggtaggctgcgccatagcccgcgccgctggcgacggtataaatgactttatcgtctttatattcctgcgcgaacgcctgcgcacgctccgctacctgctcgcaagcgcgccagacgatacggttgattttgctgacgccatcctgaaaatcgtcgtagtgcgcatacccttccgtctgctggagcagttcgaccgcactcagcaggcctttcatcgttttctctccggcaatatctttaccgtcgccaaacgtgtacgtttccacatagtcgcaatgcgccaccaacggtgaatccattatccaggttaaaccaatgaccggcgcgccgtgctgacgggcgatttcagccgctttaattgtctctggcgtattacctttgtgggaggcgacaaccacaacggcattttctcccagcgctaccggcgggttgttaataaattctccgctgttatacagaccgacagtcaacgctttcgcttctttttctaaaaatgctttcgccggatagaacgccgcataagaaccgccgcacgccacgtaatagacgtgtttaacgcctcctttctctgcctggctggtcacaatattgctaactgtctctttcatacccatcatgctttcctctggttccatcaatgatacaggcgaggattcgccataaatgactcataatgtattattatttttatatgacatttaaagacatttgatcaagatggaaaccaaaaaaaatcgggatccgcgatctggatcccgattcagcctgctcttcgttagcgtaatgctgacatcatacggtaaaccgtattttatcgccgacaatcaactgttgcgaaacgcaggagagttctcctttgttatcaatcatttcactttttatcaggatcagcggataaccctcgttgacgccaagataatgggcgacttcaaagctggcataaaccagttcgatcatcttacgggagtgggtaaaccataaatggtatttctcgcgtaagcattcatacaaagagtgattattaagatcttcgtccagcaaaaacgcaaaacgtgggggaagatgtacggtttccagcgataccgccacatcgtcggcatagcggatacgttcaatgacgaccgctttttcgccatcgttcatattcagtaacgcttttgtctcatcgtctaccgattcaaaaacggatttgatggtgcgtgaccccgggcgacgtccctgggactggcataactcgctgaaactcatgatgccggtcatgctgcgctgaaatttctcaccagagacaaaggtgcctttgccggagacacgggtcagcaaattttcacgcgtcagcgcatccagcgccttacggaccgtgaccctgctcacctgccagcgcacgctcagttcattttccgtcgggatctgctggcctggtttatactctccacgcgcaatagcctcttttaaggcggcttcaagctgcttataaagcggtttggcgcttttactgtcgggttgctcgatcatttgtatccatttgtattatcatgatgccatagcttgtattataactatttacgttacctttgcttgtgaatccacgccatgcggtgacgtagtgataccgctatgaaacgaatgttctgattttaggtctggggcgggcgtcatgaaaataggattttcgcaatactattcagtaagttatgaagtgtttttcttgagagacaaattgcaaaatgtgatctatcgcacactttgccactcaggtatcgaagcgaatgtctacgcttaatagacagccgggcaacacccgtatcttttacgacgcaagccggaggtccttgtcattatgctcaaccagaaattaaaccccacgccttctgaagatctgactattgatgtcgatctgctttatgaaacagacccgtgcgagttaaagctggatgaaatgatcgaggcggaaccggagccggagatgatcgaggggcttcccgcctctgacgccctgacccctgccgatcggtatctcgaactgttcgagcatgtacagtcaacaaaactgtttccagacagtaaaacgttcccggactgcgcgccgaagatggacccgcttgatatcctgatccgctaccgtaaggtcagacgccaccgtgattttgacttacgccgcttcgtcgagaaccatttctggctaccggaaaccttatccagcgagtatgtctctaatcccgaaaactcgctcaaagaacatattgaccagctttggccgatactgacgcgcgaaccgcaggatcatattccgtggtcttcgctgctggcgctgccgcaatcctatatcgtgccgggaggccgttttagcgaaacctattattgggactcttattttaccatgctgggtctggcggaaagcgggcgcgaagacttacttaaatgtatggcggataatttcgcctggatgattgaaaactatggccatattcccaacggcaaccggacctattatctgagccgttcgcagccgccggtttttgccctgatggttgaactgttcgaagaagatggcgtgcgcggcgcgcggcgttatctcgaccatctcaaaatggaatacgccttctggatggacggcgccgaatcgctggcgctcaaccaggcttatcgccacgttgtgcggatgccggacggttccctgctgaaccgctactgggacgatcgcgacacgccgcgcgacgagtcgtggctggaagatgtcgaaactgcaaaacactccggtcgtccgcccaatgaagtctaccgggatttgcgcgccggggcggcgtccggctgggactattcttcacgctggctacgcgatgcgggccggcttgccagcatacgtacgacccagtttatccctatcgatttgaacgcttttctgtataaactggagagcgctatcgccaatatttcagcactgaaaggcgaacgtgacaccgaggcgctatttcgccagaaagccagcgatcgacgcgccgccgtgaaccattatctgtgggatgatgaaaacggctgttatcgggactatgactggcgacgcgaagaaatggcgctcttttccgccgccagtatcgtgccgctgtatgtcggtatggcgaaccacgagcaggccgaccgtctggcaaatgtggtacgcagccgtctgttaacgcccggcgggattatggcgaccgaatacgaaaccggcgaacagtgggataaaccgaacggctgggcaccgctgcaatggatggcgattcagggcttcaaacggtatggcgacgatatgctgggcgatgaaatcgcccataactggttaaaaacagtgaaccatttttatcaggagcaccataaactgatcgagaaataccatatttccggcggtacgccccgcgaaggcggcgggggcgagtatccgctacaggacgggtttggctggaccaatggcgtggtgcgccgcctgattggcctttacggagagccttaacctgctccggcctcagtgaatcgcatcataaatggctgactgaattttcagccattttttattgtctgcgctgggccgggcctgagcgcgcaatcgggcctgctccgtatcgtgctgctggcgcgtcacaacagccggaacggtgcaaaacgtttgcaaataggttttatgcatcgcggtcagcggcgcgccgctcgacatgtcatgacttaacgttgtgataaatcgtcggcagggtttgacctcatccatcagcgcgggataacgcaacaacagttgcagcacctcggtatgtcctgccgcaaacgcctgctccgtccacgcgagctgccagttcattccgccctggaggaacagcgccgtcacccgcgtatcattgcgctctatcgccgcccgcatggtaaacgcatcccaggtaatccccatatgattgagcgtttcccgcgcggaaggcgcctcgcgcggcggttcatcctgcgccattgcgggagcttgcccgttatcggagcctggcgacgacgaactaaatagccagaacgcgcccgccagtatcgccagcgtcatgacgccaaccgcgccccacaaagcgccggaaataagttgctcacgctcttcaggcgtacgcggaggccgcttacgcggtggttctatgctctcgctaatctcatgcttatctcccccggcctgccgatctttaagccgcgcggtttcccagaactggcgcaattcacgttcatccgccagcagaaacgaagcgggattcacgcgggtacgtttttcggcataggcgcgctggatgggccgaacgatttgctgatactgaacgtttagcagcataagctgcgctgaggtaagcggctgcctggcgataacctcgtttcgcgcaaggcggcaatcatccagaaacatacgcagagtggtgcgcgactcggcgaacagcgttaacgctgaggcatcattaaaaattctgacgtaatgacgggcaaacaattttttatcgaccaccataagcgccagttcgctgaacaacatgccctccagcgcatgttgatcttctccctgttttaaccactggcgcaaacggtccgggccgaaatgttgcttgaggtagtgattcagcgacgcccgatccggccatgcgcgcgcaataagcgcttttaacgtcagttctatcgcccgaagctgacgctgcgcctcaagatgcgcctcctggtcgggttcttccagctcagtttgatacgtcagtagcggctgctgctgacgtagatgctccagcgaggtgacaaaacgcaacgcggcaaggagttgattttcgctcacctcttgcccgctgtcatactggggaacatgctgctgaaggtgacgcagttgcagcataaactggctcaactgcgcgtcatttatccgcaattttttcgccaccgcgccccaaccgcccaggttaagacgcgcctgctcaagttgttccatgaaccaccggggctcttttccctctgtggtatgaatacccagcagcagcaggatttctattgatgcctggcggataatccccaggctatgttcaaaaggcgcgcgtgtcgcctgcgaagcgctattcgtcattatcttccctaaaaagacgatcccgcgacgagatcttcgttttcttttaattatgttttttcatagatataacagatttagccacatttcagtgacttaatcttaatgattgcaaatttataagaagatcggttactaaccaaaaacatcagtttttcattctgtcaacgcggcgtgacgctgaacggcatagaccttttccctgcctgcgtttggccgtctgaccgctagccacgcgtgcagcacactttataatcgcgctttttatgagaaagatgccatgccgcacatttcatctcgctttagctccgcctgcatcgcgtttattaaacagtggcagggtctgtcgctggaaaagtatcgcgatcggcagggtaactgggtgattggttacgggcatatgttgacgccggatgagacgctgacgttcattacgcccgaccaggcggaggcattcttgctggatgacctcaatagctgcgatattctgctacagaattgcttgccggaacttaacgatcggtttcaacgcgaaacgcttattgcgctgatgttcagcatcggacatcagcgttttttatcattaatcaatacgggtgatatttcacagccagaaataagcggactgcgaatttaacgtcgttaattcgattcatttaacatcatggcggcctgggtacgattttttacatccagccgccggtaaagcgactccagatgcgctttaaccgtcccggtactaatatttaacgcccgcccaatttgtttatttgattctcctgcggcaagcatctgtaaaatttcccgctggcgggcgcttaacgcttttatatcacgggactccagctccgttgaatttaaccaatcccccggtaaaaacatcatcccgcgagcgacagcattgagcgcaaggacaaaggtttcagcatcagaatcgcgtggcaccacggcctgaacgttaaattgcatgacttcatgcagccacttttgactgccatccatcgccgtgataataatcttcacctccggaaattgctgcgcggttctttgtaacacctcgcggcaaaactcagcatccaggccgctatccagcatgaccagcgcatccggcgcgctttctattttttgccagagttcttctgcctgaccgacactctggatacttattcctggaatgtgctgctgcaaactgattttcattccatgaataaatattgactgcctgtcaaacatgattacctgcattacttttctccacctgggtaagataatagtctcaagatgaggaagggtattacccgtagggtaaaataagaagtcgccatttggtataggccattttaccgatagtcattggttgaggaagggaaaggttatgaatatttacagcttcaacatcgggattacagaattcgctaaaattagccttttaaagtaaggaatatcttattagcgcgaacagctaaggctaatttgaatattaatttaatgaagagtacgcctggcgcgtcacaaaggaaatatctgcttttcgcctgatgtgttacaaaaaataaagtagcacattttgttaaaaaatagccaatccgcctgaaaaccgcgacgatgggtcaatgacaataccgtgtatgtacatgcatttctctgccccactgcacccgctgttatcggcgtgttttaccgccctcgccccgtttatcggctttttggcgctaaaatgcctggccggaaggcgataaatccgccgcgcaacgcgatcagacgtattcgtcacgcgagcaatgattgcgaaagggcttattaggtgctagaaaatcaataaaaccagccgcttcagcgtcactgtttcaataagaacaataatagagcctgatgatggataaaatatatgcaatgaaattgtttgtacgcgtggcggaacgggaaagtttttcccgtgcagcagaggatatcggccttcccaaaggcagcgtctcacggcaaatacaagcgttagaacatcaactgggcatccgcctgctccaccgcaccacccggcgggtacagcttactcaggacggaatggtttactacgaacgggcaaaagatctgttgagtaacctggatgaactggagggtcttttccagcctgatcccgccagtatcagtggcaaaatacgggtagatataccgccatgtctcgcaaacagcctcatcatgccgcgcctgcccacttttttgcatcagtatcccggcattgcgctggaactttgtagtagcgatcgacaggtcgatttactacgggaagatttcgactgcgtggtgcgcacagagccgctacatgcgccagggatactgacgcgcccacttggcaaactgaggagggtgaactgcgccagcccacaatacctggcacgctttgggtatccagaaaaccttgacgatctcgcctcacatgcgatggtgcattattcattgaccccgggagtctcttcaccgggttttgcctttgaaactccccacggtatgcagtgggtaaaaaccggcggaatgctaacggtaaacagtacagagacctggcatacggcctgtctggcaggattaggaatcattcagacgccgcgcattgctgtacgggaggcgttacgcgccggaacgctcattgaaattttaccgcaatatcgcgccgctccactgccggtgacgctgcattatccccatcgccgtaatctttcccgccgggtacacctgtttatggtatggctgacggaaaccattaaagaggccgcagagtagccgcattttcagcatccaccggggagaagctatactgacatattctattaatgatgaaggactaccgacctgatgacgcaggaaaatgacgtaaaacgccctattcaggaactggagcacgacccgatacaaaaaatagaaacgcagccgcatgacgccccggaaaaaaacgaaaaggcaaatcaggcgttgcattccgtcaccaccctgatgcaaaaaattcagcgtcaaccaatggtggcccacctcattcgcgcgaccgaacgttttaacgatcgactgggtaatcagtttggcgcggctatcacctacttttcgtttctgtcgatgatcccgataatgatggtgtcctttgccgcggcaggttttatcctcgcctcgcaccctaatctactggaagatattttcagcaagatattgatgaatgtgagcgatcctacgctggcgtccacgcttaaaaatacgattaatacggcggttcaacagcgtaccacggtagggctggtcggactgggtatcgcgctctattccggcgttaactggatgggcaacctgcgggaagcgattcgcgcccagtcacgggacgtctgggagcgcaagccgcaggatcaggagaaaatctggctcaaatatctgcgcgattttatctcgctgattggattattaatcgctttaatcattacgctgtccattacttccatcgccggttccgcccagcagatgatcatctccgccttgtatctcgacagcatcgaatggttaaaaccggcctggcatttgatcggtctggccatctctatttttgccaactatctgcttttcttctggattttctggcgactgcctcgccatcgtccccgtaaaaaagcgttgattcgcgggacatttattgccgctatcggttttgaggtgattaaaatcattatgacttatacgctgccgtcactggtgaaatcgccttccggcgcggcgtttggctccgtactcggtctgatggccttcttctacttttttgcccgcctgacgttattctgcgcggcctggatagccaccgccgaatacaaggacgacccgcgaatgccgggtaaaacgcaacgctagtctgcggcttgctgccgaatggcacgcacggcgtcgtcattcggcctactgatgtgtagacccaggccgggcaagcaaagcgtacccggcggtacaatcaggcacgtccttccgcctcatctcattgtttcagcatataaatccagtaattaacttttatttaaccagaaaccagttttatccaccaattctaaaattatgtgaagcatttcatagacgcaaaatggctggcttaaacattatcccctttttgcgctttttttgaccatttttagcttttgttacacattgaaatataacttttgctgtgcgtaatatggctattcgttcgctaaaaataagaaaatagtatgcaagcaaccgccacaacactcgaccatgagcaggaacatgttccggtaaactcacgcaataaagtcgttattgcctcgcttatcggcaccgcgattgagttcttcgacttctatatttacgccaccgcagcggtgatcgtgttcccccttatcttcttcccccagggcgatcccactgcggcaacgctacaatcgctcgccaccttcgctatcgcgtttgtggcgcgtccgattggctctgcgctattcggtcacttcggcgaccgggtaggccgcaaagtcacgctggtggcttcgctgctgacgatggggatctccacggtcattatcggtctgttaccgggctacgcgacgataggtattttcgcgccgctgctgctggcgctggcgcgtttcggtcagggactggggctgggcggcgaatggggcggcgcagcgttattagcgacggagaatgcgccgccgcgcaaacgcgcgctgtatggctccttcccgcagttgggcgcgccgatcggcttcttttttgccaatggcaccttcctgttgctctcctggctgctgaccgacgagcagtttatgagctggggctggcgcgtgccgtttatcttctcggcggtgctggtgattatcggcctgtatgtgcgcgtgtcgctgcatgaaacgccggtgtttgcgaaagtcgccgcagcgaaaaaacaggtaaaaataccgctgggcacgttgctgacgaagcatgtccgcgtaaccgttctcggcacgtttattatgctggcgacctacacgctgttctatatcatgaccgtctattccatgacttacagcacggccgccgcgccggtggggcttggcttgccgcgcaatgaaatactgtggatgctgatgatggcggtgattggtttcggcgtgatggtgcccatcgccggcctgctggcggacgcatttggccgtcggaaaagcatggtcatcattaccacgctcatcattctcttcgcgttgttcgcctttaccccgctgctgggttcaggcaatccagcgctggtattcgtgttcctgttgttaggcctgagcctgatggggctgaccttcggcccaatgggagcgctgctgccggagctatttccgacggaagtgcgctataccggcgcatcgttttcctacaatgtctcatcgattctgggcgcttccgtcgcgccgtatattgccgcatggctgcaaagccactacgggctggcggcggtaggggtttacctggcgtcaatggcggcgctgacgctgattgcactgctgttaacccatgagacgcgtcatcaggcgttgtaatagggcgccggatggcatcatccggcgctacgtttcacgttactgcttcatctgcgttaaaatcgtccggcactgattggcttcgccttcagagggcgaaattagcgccaatagcgcggcggcgggcgttaccaacgtcgccagcgctgccgcaaccgcgccgcgcgcaatcagcgggccgggcttgacgcccgcctgcggatttttaaatgtcccgcgcacgtacagcggcgatcgcagcgtaataatacgaatccccttactttccggatcaatggttaaatcgagctgttcagaggcgaagctcgccgtaccggtcacgttaatcaacgcattttctgtatcaaaagcaaaaatttgcggtcgcgccacgccgttcgtaatattgagattcgccgccgcgcagttaacccgcacttcgtcatcgccaaaaatctgcccgacaatatagttgccgacgttcagccccacgatttccatcaggttgcggctaatcaatccatcattcatcaataacttcagattgccgttactgttgccaagcagcgcggcgaccgagttgcccgtcccgcgaatatccgcatcgccgttcagctcgcccagcgttttctgcatcagctccacatccggcatcagttctttaagcttcagccgacgcgcctgtatatccgcccgcccctgcattggctttttatccccttccagatggatgttggagacaatactgccgcctgccagaccaaacttcagcggctgtagacgtaagtcggcgtttttcaggatgatatgggtcgaaagatcgctaatcggtagactgccgccatgttcaatacgtcggcctttaaaccggacatcggcgtccataacgtcccatttgtcggtttcaaagcgatcgtaaggcaacactttatccgccggctgaacattcttctcgcctttgcgctgttcagaccgtttcgactgctcagcgtctttcccggaatccacgccaatcagcggcccaagatcggccaggcgtaactggcgcgattcgacatcgccttccagtttagggcgcggtttaccggtggtataagtgagggagccgtggatatcactgtcgccaatgcgcccgttaaaaccgcgataatcaaatactgatgacttttcggcgtcaattttcgccaccaatcgcccatcggtctcaaacggcggcgtatccggcagcagcacgccggttaaatcatataaatcgcccagtgaatcgccagagaatttaagccgcagatcgacgccgcccattttcatcggttcgttcaccacgccgctaaaagccacccgcgtattaccagagcggaaatcggcctgcacaggaaaaggcgtactttcgctgcgtagcgccagcataccgcctattttccccgtaccggtcaacggttccccgttataacgcccctgcgccttcaggccgaagacatagtcgcccacggtggatttgtctgctttgcctttcgttcccgtcacttcgctgaacggcaacggtttgcctaacggatcgatcagaatagtgatatccgccttgctgaccttatcatcgatcgcgattcgcccctggtcgaagagaatattatccagccggaaggaccaggcggaaggtttagcattggggtccgtattcttgtcttgcgcgaggttaaaggtccagttattggttttctcggacagacgaataagacgcgcgtcgggtttcaccagtttgatccacggcagccagacggttttggtcaggagcgccagtggggcaagcgtcgcctcaacgcgtggcagatgcaccatcgtgacttccggaatatctggcggattgccgagaatgacgtcttccgcgtgaacatgcggccacggtacccagcttcgccagccggtctcctgtttttggcgttcccacaccacgcctaaatcgccgcgaatagcgaaaggccggttcaattcggtagagactttctggttgatggtcggtttgaggcggttccagtcaaatgttgcgatcaacaaaatcactatggcgatcaacaacaagaaagtccctgtgatggcggcggttattttgcctgctttagtcatgtgttatttcctcacttcttcccttgcctgtcctaaagatagttcagccagacgaaaaaggaggatgaccgcgcctcgtaataccacgtattacgggaacagtctggcgttacagggtcagaatcacctcttcgagcgatatcagcggcacgggtcgagaaagaaaatagccctgggcggcaaaggcgggcgaacgctgcacatcacgccactcttccagcgtctccacgccctcgacaataacgccgcggcagtagcggttcatcagttgcagcagcagagtgaacaggttgcgtccctccggggactgacgcagcatgacgaacagctcgcgcgccactttaatgtagtcataacgcacttcgctcagcgctgaaaaattggccataccggtaccaaaatcatccagccacagcgggccgaactcacacatcgaggcgaaagaggagtctttcggcaaacgaatatgttccaccagttcgaaacgcagccagggtaagcgctccatcgctgccagaatgtccggctgtcgtcgcatggcaatcagcgtagggccgtcgacattgaccgatgccaataagtgatggcgagtgaaaaaatccgctttttgttcgagctgatgaagttgttctttcactacgtcaatgcggtgtcgaaccgctaactccgcgaaataacgatccggggcaatacgtctggaagggttatcaggatgggtgacgacagtgagaagttcaaccgccatcagacggccatccgtctggtatatcggctggtaagtataggcacgctcgcattgcagccaatagcgccgttcctgcaaattctctatacctgcatcaggaacgcgtagctgctggataacctgctttatcatctcagttgtcctgttaatgggagtgtgactgtccggactcgtcaaaggttatcggcgttcaggcagagaactttaccctcggtccctggcaaaataaaaacagcccccgaaacttgtcaaaaatacgcacttgctcaaaaaaataatggaccgatgttttaatattattgaccactaaacatccacagcgcacactaacgctaatttttacagatcaggttcacgactatgtctaaaaagattgccgtgattggcgaatgcatgattgagctgtcgcagaaaggcgctgatgttcagcgcggcttcggcggcgacacgctgaatacctccgtttatattgcccgtcaggtcgattctgccgctctggccgttcactatgtgacggcgctgggtaccgacagtttcagccaacagatgctggaggcgtggcagcatgaaaatgtggatacctcgctaacgcagcggatggaaaatcgcctgccaggcctctattacatcgaaaccgatgacactggcgagcgtaccttctactactggcgtaacgaagcggcagcgaaattctggctggagagcgagcagtcagcggctatctgcgagacgctggcgaccttcgattatctctacctgagcggcattagcctcgcgattttaagcccgaccagccgtgataagctgctgtctttattgcgtgaatgccgggccaacggcgggaaagtcatttttgataataactatcgcccgcgtttatggacaagtcgcgaagaaacgcagcaggtctatcaaaagatgctggaatgtactgatatcgccttcctgacactggacgatgaagacgcgctatggggtcagcaaccagtggaagaggtcattgcccgcacccatgcggcaggcgtgcaggaagtggtggtaaaacgcggggcggactcttgcctggtctcgattcagggcgaggcgctcattgacgttccggcagtgaaactgccgaaagagaaagtgatagacaccactgccgcaggcgactccttcagcgccggttatctggccgttcgtttgacgggcggcagcgcgacggatgccgcgaagcgcggacacctgacggccagcacggtgattcagtaccgtggggccattattccgcacgacgcgatgccgcagtaagtcattcgctcttgcccggtggcgctgcgcttaccgggccgacaggcggcagcttactgtgccgccggtgtctccgtcacttccggatgcgcctcatctgcttcaacagcggcggcagtagtcgggaccatgatttcatcccacgtcgcctttaacgccttcatattaaattccggctcgccttgcggttgcagcaaaattaatgccatctcctgcgatagctgctgacgtaaattctgattgagcatatcaacggtcaggctgttgaggaaattctggcgcagcttctgatactgctccggcgcgatatccaccacttgattctgcagcgagcgcatacgctgtccagtcaaaatgtcagtatcggtacgcgcgtaggtcgcgaacagcttttgcaattcgagatttttctgcgccaccagcgcagtaaactcctcttccgacaaacctttgtcgcgtactttcgccagttcattcgccaccaggctcaaattggtattgagcttatcattaggtgattcaatgttgatggcgcactgcgcgcgcagaaacagaacccggcagtcaaaccccagaccaatatctttcgcgttatttttagtaagctcttgctggatatgccagaacagcgcttcgcgcgccagatccgcctgccagtagcgcaacagcgccgccgactcgcgaatcggttgccacggcgtatcccacataatggagagacgatcctggcgcaccgcatcggtcataatgctcactgattccgcccgcagcggcgaaagcgtcggcaccggggcgggcgtttcgcgtttacctttcagcgtaccgaacgttttattgatctgctcggcgacggagcgcgcatcaatgttgccgacaacaatcagcgtcatggcatccggggtgtaccatttttcatagaaagcctgaattttggctgcgtctaccggctgctttaacggttccgcgggatcgtgccccaataacgccgaccctttcagccgataacgccaccagccctctttagtatctgctggccacgtcgcaaccatatcttcgctgcttaacgcatgattcaccgtctctggcgtaatggttaatttaccggagacgttagccagataggtcagcgcttctttcagcagatcgttacggttattgggtaaactgaggttatagagcgtggaatcataagaaacaataacgggcggcatgggacgtttcggatcaaacccttgctgccataaagaacgtgcctgtgcggcatccagaccaccgctttgcgtcagcgcgatacggggaatcgcatggctgaacccgctctgttgcgtactttcggtgagcgaaccggtattaacctggagacgaacttcaatacgatcgctggggcgctgaggcgtagccaacacttgccactgtaacccattagccagcgtcccctgttgccatgccggatcgggctggagcgcatctgcctgcacatagccggcagaggccaacatcaacagactgcccgctaagagtcgaatttttgtgccctgcatgtgaacccctgatcaacaatcctggtaataaaaagacagccccggcagggatgcctgaatatgacgtaaaaacacttcgtgttagaccgcgagaacctaaaaatgtcacggaagaagtgaaataatccctaagcatcatgctgtatgctttgggcgcaggggtcaattatgcgcaaacacccgcagtcctggaagggactacgggcataagtggcgagattaggaggaaatttcgtgcgttttgccatccggcgcacgattattaagcacatcgtccagcttttggtgatctaactctttcacccatttggcaaccaccaccgtcgccacgccgttacccaccaggttagtcagcgcgcgcgcttcggacataaagcggtcgataccgaggattaacgccagtcccgcaaccggtaaatggcctacggcggagatagtggccgccagcacaataaagccgcttccggtcacgcccgcggcgccttttgacgatagcagcagcacgaccagcagcgttatctggtggaagatatccatatggctgttggtcgcctgggcgataaacaccgccgccatcgtcaggtagatagaggtgccatcgaggttgaacgaataccccgtcgggatcaccagccctacaaccgacttacggcaccccagtttttccatcttatcgagcatacgcggcaacgctgactcggaagaggaggtgccgagcacaatgagtaattcttcccggatatagcgaataaatttaaaaatgctaaagcccgttacccgtgcaatcgtccccagcaccaccaccacgaagagaatacaggtgatatagaagcagataatgagctgccccagttgcaccagagaaccgacgccgtatttaccgatggtgaaggccatcgcgccgaatgcgccaatcggcgccaggcgcatgatcatattgatgatgccgaaaatgacctgcgaaaaactctcaatcacattgaaaatgagctggcctttgctgcccaaacggtgcagcgcaaaaccaaacaacaccgcaaacagtaagacctgcagaatgttgccgctggcaaacgcgccgatcacgctacccggtatgacatccatcaggaaggcaataatgccctgctccttggcttgtgcggcataaacggccaccgcctgcgcatccagcgttgccggatcgacgttcatcccggcgccaggctgcacaacgttgacgatgataagaccgataatcagcgcaatcgtactgacaatttcaaagtaaagcagcgcgaccgcgccggtacggcccaccgctttcatgctttccatgcctgcgatgcccgtcacgacagtacagaaaatgacaggagcgatgatcatcttaatgagcttaacgaacgcgtcgccaagcggtttcatttgtgcgcccagttcaggatagtaatggccaaggagaataccaatggcgattgctgtcaggacctgaaaataaagacttttgaacagagaggttttcatagggtgtccttgaagtaaaaaccacaggtcttgtaaggttatgagtaacctgcggccttaaaataacacccacacaacatgacagaaatgcgccaggatcataattgaaacaaaaatgttaaaaagtttgagctggctcgcacaagcgcgaccttttttaacttttgtaatcaggattttcgtgcgacagataccgttcttcaaagatatccgcgggaacgggccgagcaaacaggaagccttgcgcgacgttgactcccgcctgttccagccacgcgcgttgcgcctcgttctccacgccctcggcaatcaattgtaaattaagactgcgggccatcaggataatcgccgtcaccatactgtgatcatccggtaacccatcgacaaacattttatcaattttaaggatatcgaccggtagcgacttcatatgctgtaactggcgcagccccgcgtaacccatgccaaaatcatccagtgcgatacgcacgccagcattacgtaacggacgtaagatagcgacggcagcgtgtggatcgtcgatacggcggctttcagtgacctcaagaatcagcgtacccggttgaatacgatagcggtttaacaattccagcagatccgacaccatgccagggtgcatgagctgtaacgcggaaagattgacggagagcggcaatgtcacgccgcgctcctgccaggcggcaagctggcgacaggactcttccagcacccaatagcccaccgtgaccatcaggccgcaggattcaatgcgctcaatcagcccctccggtaattcccagctaccgtccggctgctgcatacgtaacaaggcttcggcgcttaatacgttgccgctgcgcatttcgacctgcggctgcagccaaatggcaaactgatggttatccagcgcggtaaggatatcgctctcttcggtaaggcgctgttgagcggcctccatctgcgccgggtcaaagaactggatctgatttttaccttttcggcgcgcggtaaacgcggcggagacggcgcgaccatagagcgcttcggcggtcagatcgccataatacatcgcaatgccaatactgcagcttgggcgcagttgaataccctggatgggcagtcgttcattaatgatagtgagtatttgctgacctaatgtgatggcgtgccacggctctttaacgccgtgggcgataatggcaaagtcatacccgctgacctgcgtaagcaccatgcgcggcgccagcaccgacttcagcttctcaaccagcgtcagtaatagaatctcccgctgcgtttcttgcagcacgcctgccgtgtcacgcaacgtttcgcacgtcacgatgataagcgcggtggtctgttggcgggtgataacctgttccagcaatgccattaaaaaggctttattgggcagctcggaaaccggaaaacgcatcgcgttgtccgtttgctcctcgcgttgacgctgcataagctgctggttgaggttatagctgcgcaccagcatcccaatttcatcatcctgatgcagacgcggcaacgccagctgatgtccgatcagctcctgctgcggaatgtcgttcagctcgcgggcgattttgcgcagcggatgcacaatcaggcggtttacgcaccaggcgatggccaccgtcaggatcagcgataaaagtaagtaaatggtcactaacgtagagagcgcgctcatgacgaacttgtacatacggtacgaatccgcctgcaatacaaggtaggccagcggttgcggattggcaggacgctccaacgaataaaccggcaaagaaatttgtaccggcagttcgaagagacgcgtcaccataaccgggacggggcgttcaggaatgaagcgcttacgcaacgcctggaactgattcggcaataccacatcggcgcgactcaccacgcccgcaggtttaatactttccagaatggtttccgcgccggggagatccgcttttaaaatcgcggaagaaagaggttcccgaacagatcgcgcgatgctttccagttgcgtagccgtgttgtagcggttctgctgtaccagatggaacaacaaaacggtgcaaaagacaaaaacaaacatcatgacaacggccgcaaccattgccatctgtttaattgttaacgagcggctgacgcgcaaattgactctccctggatatcccggactgccgcctgagtatacccgattgcagcggcattaagagaggctgtatctgaaaaggacttttctgaataacggttaatgatagcgtctgatggcgctgcgcttctcaggcctacgacgcctgtcaattcgtaggcctgacgcaatgattaccagtcagcgtaaggcaccagaggctgcggcggtaaatccatatccccctgccagcccgccgcggaataacgaacatacagcagcagatgactgggggtatagtctttcgcctgctgaatatcgacagccgtacccacaaaccagttggcagtgacccggcgttcaatgagcgcccgcgcggtatagccaaatccctggctgctgccgccgccgttggtctggtcacgcgcatcctcctgataatctgccgggatcaaattcatcagcggataacgcggcatggtacggttgcgggagtgcgaccaggataccgagccgcctaactcccacgaccagttttccgtacgctgccgccacatcaccggcaccgcaaacgacaggtattcctgcgggctataataaccgccctgacccagtgaataaccgctcagatctttgtcgtaatgccagatcatgttattcagcccgacggtaacacggcggttattctcgttaatcaccttatagtaataaccggtcatccagcgcacgcgccagttatcttctacatttttaccgctcaactggtcgccgctgagcgacgcccagacaccgtttgcttcgcctttatcatagctgagactgacgccgccgccgttggcccgcacgccgccccatttggtgccggtattgctgctggcatccttttgcccgccaaacgccagcagcgagctggagatcgggcgacgatgcgcgttcagggtataacccaacggcccgatatcgtcgctatagctgacgccgccaaccacatcaacgacattaaagcccatcggcgtcgtgccgatatcccagcgccaggtctcattctgccagccgaccgccacgctcgcgcccgtatcggcctggctacgatgtccgctgcatttctccagcgtacaggtaccccagttattatcgtattttccatccgcatccgtagagaagcggccaacatccatattcaccatatcagtacgaaagaacgcccgtccgtccgaccagggcgcatccacctgaagcatcgtggtatgcgccttcagatcggagtaaccgccagtcccgctcgacccccaataatcgtgcgccaacgtgacattgagatcctgctgacggtacaactccgccgcatcgctacgcacgccgcgttttagccagtcgtctttttcatcattgcgcgtcaggcgggtaaaggtatcgttatcctggggacgaaccggcgtaatcgccgcggcgaccattgcgtctttgtaggtctccagcgcccgctgcggctcgcccgtttgcgcctgaaaagcggcggcgtcacgcaataccatcgcgctttccattgatggcggctgtgcttttgcctgcggcgtaatgcggttgaaggtccgcgccgccgccgtgatatcgccaagctggagctgcgccagcgcgacgcggcgctgcatgttaatagaggtgatttgcgacgcaggcagcgccgccagctgagcgcgcgccgcagcgttatcgccctgtgcgatgtcgatttccacccgccccagcatggcatcgacattacccggttcccgcgccagaacggcgtcataagcggcgcgggccgccgcattatcgccacgctgctgcgcccagtccgccaacgttaacgcaatgcgcgtagagggcggctgctgacgtaacaacgcttccgcttcgcgttctttgccgctatcgcgcaagcggttagcgctttccagcacctggttactttgcaatcggcccgccagttcctgaatattgctgttccactggctggtcggcagggtattgagatgcgccagcgccgcccggtcccgatcgctgccggaaagataaagcccataagcatagacctgttccggatcgtttggcttctgctgcgccagagagcgcatttgcgcatcggcctgagcgtgctgcccggcctgccacagatcgcgtgacagtcggtacgtcacccacacgctccccggatctaatgccagccgacgacggtgcagttctgcggcctgcgcccatttgccctcgctttccagcgtttccgcctgctgcgcaagacggtcattttccagactgcgttcgatatcgtcgatactgcgccgctggctggcggaaagagaagcgataaacgcggcggctttttgcggcgactgctggcgataaagattcgccagcccgcgtacagcattggtattaccgctatccatacgcagcgtctgctgataataacgttcggcggcggcattatctttgcgcgccatcgccacatcccccagccccagtaccgcgtagctgtcggtgttatccactgctcgcgcctgctgatagaaacgctccgcctgggccagattattcgcttttaaggccgcgtcgccctgctgaattaacagccagtagcgattgaccttcagcagactctcccacttatcgcggctgctgctgtgcggcgccatcgccagcgccttttcaaactgcgcgacggcgcgggcgcgatcgccacgctgtgagtatgcctgccccagcgcgccgaccgcctcgctgtcgtcctgccgggcgctcaccgcctgctgcaattgcgcaatggccttaccgccttctccggcattaaccgccgcgatgccctgcgagcgcgcacggaacgccggatcggctaactgtttttgctgctcgctaagctgggcgcgggcggcagacacgctatcgccttcgctaaactgcgtcagatagtcttgcaacgcttttacgctggcgtcgctaaccgggagatcttttatctgctggtaccagatggcggaggccgcgctgcgtcccgtactggatttcgccatctgtttaagcaccgcgaatccctcatcgcgccgcccgctggcgaacaacagttgcgccagcgcattttgcagagcgttattacccggactgacggcattgattttctgtagctggttaatcgcttcgtgacggcgggcgggcaatttcgccacggtcgtccagtattcgaccgccagttcgccctccggcggataacctttaaacagcttgtcgtagctggcgatcgcttgttcagtatggccggtcgtcgccagtaaacgcgcctcctgcaaagactggcgtccttgcggcgtggagagcagcatcgcggtgcgggaagattgatacgccgtcgactccggcgccagttgcgccagccggtcaagtagcttctgtgccccgtcgctatccccctggcgcaacagatagcggaaacgggcggcgataacctgtggatcattggggtcgatcagctccaggcgatagagcgactgacggactaagtcctcacggtgcgtggcctcgcccagccgaacctgctccagcaactgttgctgcgcggaggtcgctgcgccggcaagcggtgttagcgccataccaagcgataaacccaacaatgcccgagaaacgccccttttgccaggtaaggcgtttcgaccgccagccggcaaaaaagcgtgcatgagacttaacgtgaacttacgcattcctggccccagtcaggtaataattcacctttgacggtgaagcgaaaacggtgctgatcccagccttgtccaaagagagtcagcacatagttgtaataggcatcgctgccaggaaaatggtctgcgacccgctgtcgctgcacggcctgggcgtcgcgattttgcaggaaaggcagtaaggcggcggaaaacccgaccggccccgtcccttgcgcattcccgctgacgacatccactttctccggtggaacgccgtttttcatcgttaacgtcgccatcggtttaaatcgcgccagtaaacgcgctttttgcggatcgccatcatgcatcattcccgcccataaatagacgcgaatcgcatcgtagctactgatcagcgtcttttccgctttcaactgccagccttgcttgctttcataacgcacccagtccggcgagaaacctttcggcgcggtttccagcaaaagccgcaaattggtttcccgtaacgtcgaccacggcgcgccaaaacggctaaagtattgcgccaactgcggcggcagatagcttgggttaaaacgccagctattcgcctcggcaaagccgattttgccaggtagcagcattgagcccagccccggcacattcaggacctcttcgcgggcgatgcgttttagcaacgccgtgcccacctcggtataacgcgtctctttccacagacgaccggcctccagcagcgaccatgccatccagatatcgccgtcggacgcggagttgctgtccagcaccgaccaggtgtcgggatctttttgcccccacagccaggcgggcagatattcacgcaacgatccctgcgccagattgttttgcgtccagttaaacagttgcgcgaacgccggtcgatcgttcgctgccagggcaaagaacatggcgtagctttgcccttcggaggtggtaatttttcgcgcatcgcccggatcgataacgcgtccctgctggctaatgtaatctttcttgaactgttcccacgcaggccagctacaggctgcctgcgcatttattgccgtcagcatgacgagcatcgttatccatccgcgcagcatagtcatcatgcgttactcatggtcagggtcgagacgacggcgactgagaatacgtagcagacgccacaatacccacgccagtaataccacactgagggccgccagtaccgccagcagcaccgggtgattcgccagcgcataccacagccgctcaaaccacggcagatgtccgacgtaatagatatcgccaacgcgcagactgtgaacgccggactcgcggatcaccgccacggaaccaaacatcgcggcgcgtttaccgctgtcgttcacggcgtcgttcagtagctggtaaccgcgcgggctgtcagccagcagagcaatcacgctgcgctgatcgttaaacggcgactggaagcccaccaccgccgccatcgggccgctggcggtgacggtggactgcgcatccgccgcgcgatcggcctcatccggcataatcgacgggaaagcggtctgccgcatcggggtttttacccagctttgtgtcgcctgcaccaacagatcgatacgcttatcgtcttttagcttgcccggaatagcgctaataatcagcagatcggcgtctttgtcggctatctgagcgctatcatcggtgattgtcagattaattgccgggaaaccggtctgtccgccaatggcgccgaccgtattcagcagcgtttccatttgcgcttcggttggggtcttcggcatcaccgccagcgtgtcagacaggtcggccatccggctgaacgggaaacccgcattggcgaacgcgcgtaaatccggcatcgcgataaagtggtaatatttcgaaaaatcgatagtggagtcatcccctatcaccacatgattcggtaccggctggaaggtaatacagttgtccaccgacccgcccggcatcggattcatatagcggaagtcaaaacgtagttggttcatcgcccccagtttgagcgccggaatagacacatccgttttaccatccagcagtccctgaagtaccggcaggcgcaacaggagtcgattagtttcctgcgtgctgttaaggctaaaggcttgcaggaactggttattcagactgatatccagccgtgaactgtctttggtcggcggcgaggtataacggtagttgagatccatatcaataccgttgctacgcagcaaatagaggtccggcggcagattcaaagaaacgttgatgggcgccggctccagcccactcgactggagctgctcttcataggttttcagctcgccaaaagtgaccgggcgatcggtacgcacccagttcggcgcatcatacggtttgcgcgccagcagcggttttacatcgttgaccaccacgctggaaccacggaagagaatattcccttgtgcgataccttttgccgcctgcaacaggtctttatcatctcgaccaaacacaaccagcaacttcacatacggattatccggatggctcatcatctcgataaccggcgcgttaaccgcaggatgatcgcgcaggaaatcggggcgtcgatcgttggtggcgaacacgatcgcattgcgatccggcaggtgattatacaacaccgggaagcgctgaccgcgccagcccgcccgcgatccaaaccaggacgcgacaatagaagccgcctgctgctgcgccagatccggcatatcagcaaacactatcggcaacgtcactggacggttatcccgcggatcgaaaaacggcaccgggaagtgggacagatcgttattcaccgccagcatgttataggtcagatccagggcgctatttcgcccgatgtctaaccacagagtactgctggccgggttttcacacacgtcgcgatagtggccgacaaactccagccgcacccggttaaagtcggtgataaatagcggattgataggtacctgcgccagcgtctttttccccaactgctcttttgtcaccggcagtacgcccatcagttcatcattgagataaaccttgagctgcgactgaaccggcaggagcgacggcgagggcgtatattccagattcagcaccgctttcgacgccacttcatcgctgcgcataccaaattcaatgccgccgttagggttaacgccacgcagcgccatactacccggcggcggcgcgatttgcgcaaaggtcagcttgacctcgcgcgaaggcgcggtctgcgccacgacgggcgcctcagttgcgggcgacggcgcaggctcggtgggttcagcatttatcaatggcggcgtagcaggcgccgccgccgtcatgaaagcaggaaacgcgcttaatcctattaccgccgcacacatccaggacaattttcttttcatcgcattatcatcattgttgagcctgagccataacccgatccgacggctgtatcgccgcttgccgctccgggcgacgcggaataaacgatacaatccaggcaattaacgccgtcaacgatcggaaaattacttttactgaaggcggcgcgaattccgcgaggtggcgatatccgcggaagcccagcttcagaatatccagcaagctttccagcggtttatcttccgggaagctatcttgccaaagcgcccacgtatcggcgcgcgcgaaggtacactgcacaaaatcaatatgttgtttggtggtgagcggcatcagttgtagcccgacctcattgcccgttacgcgcaccacctgcgttggaaagacatattcctgctgcccgcgtttaagcaacagattcactttctgcccttccagcacctgcgcctgaccgttgatcttgatgcctaacccgccgtcggagaagtcatgtacggtacaggagaacaaatgtccatcttcgcgggcgatggcccccggcatggcaatctcgacccgatgcgcgcgcctgacctgtttactctctaccgaaaccgcaaccgcgccgccgagaatgaccaggttatagaagacccacaccaggctaacgatgacggtcagcgtttcattttccggcccgtaatagtatcgccatacgcccgccgccacgccgagcaggttaagcaagacaaggaagatatacggacgcgagattacccagtcgacgtacttctcttccaccagcccgcctttcgccgtgacgttaaatttccctttgtgcggattgatcaacgcgaccagagtcggcggtgcgatataccatgccagtaccgtttcatagatttcactccagaaagagtgacgatacttgccctgaatcttcgagttagtcaggctggcgtggaccatgtgcggtatcacaaatagcgcaatcatcaacgcaggcgcataaatgatataggcgtgcagcagcagaaaagccagcggcgcggtcagaaagatcaggcgcggaatgccggacaagaaatggaacatcgcgttgaggtagcacagccgctgcgccagttttaagcctttaccaaacagagggttatcgaggcggaaaatttgcaccataccccgcgcccaacgaatacgctgcccgatatgcgccgacaggctttccgtcgccagccccgccgcctgcggaatgcgcatatacgctgaggtataacctcgccggtgcagccggagcgaagtatgcgcatcttccgtcaccgtctcaacggcgataccgccaatctcatccagcggcttacggcgaatcaccgcgcacgatccgcaaaagaaagtggcgtcccacatatcgttaccgtcctgcaccagtccgtaaaacagcgtgccttcgttaggcgttttacgaaaacgtcccaggttgcgctcaaacgggtccggggagaagaaatgatgcggcgtctgcatcatcgccagctgtttttctttcaggaaccagcccattgtcatttgcagaaacgagcgtgtcggcacatggtcgcaatcgaagatcgccacaaactcgcctttcgcgtgttttagcgcattgttgatgttgccggctttggcgtgttcatgcgtggtgcgggcaatgtaatgcacgccaacatgtcgggcaaaatgacgaaatgattcacgcccgccgtcatcaaggatccagatattcagcttgtccttcggccagtcaatgccaagcgaagcgtaaatggtatttttgaccacattaaggtcttcgttataggtcggtacaaaaatatccaccgtcggccactgcgacatttctttcggcaacggcaccggttgacgatttaacggccacaccacctggaagtaccccagcaccagcacaatccaggcgtaggtttccgcaaacagcagaatcagcccgcacaccagactgaccgggtcgtcccaatttagcgtcgaggtatagcgccaccagatataacgacaggagaccgttaacgacagcacgatgagcatcagcgcggaaaagcgtcccggcatacgtcgtaccaacagcgcaacgccccacagcaacagcagaaagataaattgcgatagcgggttaaatggctgcgtaatacagatcagcgccagtatcagtgaaaaggtcacgataacgcccagaataaaacgccgggcgccgttgctaagatgtcccagctctttttccttttccaggtgcgttgtcttttggcgcacccgttccggtaaggtatccatccattgatggtaacgtccacgaacgtccttcaggcgcgcaaatgaccgccagcgcggttcatgacgttctttagtcgacgagatcatcaccagccagagggtctgaatgaggtaacgggccgggtccagcgggcgcgggcgtgcggcgttaatatgcggataaagcgctttatgcccgtcgcgaatacgctgccagcgcggatgctcaagcggaaacactatccacgccagaatcgtccacaggcagccgagcgctgcgctaaacggcgacgcgccgtggcggcggtaaccctgatagcgctcgctcaaacgcgcgctaaccggcgggataagcagccaccgggaaagggcgctcatcgcaggctcccggcggacgttttgtcgcccgcatcatgcagcaggcaccagttcgccagcgttaacacctcttcggcggctaacgaatcgctgcgatattcgcctaacggctgtttcgacgccatgcactccgccatcgcctcatcgcgatggatcacaatgggcagcaaccggcgctggctttgcagccagacctggtacagatcgtcctgtaactgactgccaatgcgtaagtcattgatcagaatatgcgctccggcaggcaacgcctgctgatgaaggcgaatatggcagttagcgtcaacccgggctatcgccagcgtatggtcgcagaggctcaccagttgccgtgtcagcggtgacgcgccgtagggcaagtccagtaaaatccagctataacgcccgctcgctttcagcgcctggatagccgatccgatctctcccagcgtctcctgccaggactgcggattttcccgctcttgcgcggtgagctgtccaaacggcagtagatcaagctgtgaggtataacgtaatccggcatcgcgccagtcctggccgtccagcaacgatcgcgcccaaccgccctgatggacgaagtcgacgttaaacgacatgcgcagcaggttatcggggctggcgtcaatcaccaggacattttcccctaagatttgtaacgcccaggcgagtgctgcggtgagagatgtggttcccaccccgccgcgcacgccctgcagtcccagaatcgccattcatggcttccttaatgaatgtggttgcgcaaattcagccaggagcggccatcttttaatcgccgccgccaactgttcgcgttgggaaatatcggtataatctatttcgggtagtgaaaacgcctggcttaatgccagaaaatcattttgaaaagtgtagcccaacgttggatcggactgagcgccaggttcattgttatacattctggttgctcctttttaaatatttctcactggcagcattacgccccgtcgtcaatacgggagaacgcgcatttttcatctttccgtgacatcatttataatgtgtaaaaatgcaaagcgcagagttacagggcatcctgccgggcaaattgattcacatgctaaatctgatgcgttttaatttcaatgttaggtttatttctgtgctttcgctagtaaactgataaacagttaaaatagtgacatgagggacactgtggaccccgtattttctctcggcatctcatcattatgggatgaactgcgccatatgccaaccggcggcgtctggtgggttaacgccgatcgccagcaagatgccatcagtctggtgaatcaaacgattgcgtcacaaacggagaatgcaaatgtcgccgtcatcggcatggaaggcgatcctggcaaagtaatcaaattagatgaatctcacggtccggagaaaatccgcttatttaccatgccggattcagaaaaagggctatactctttgccccacgatttgctttgttctgttaacccgacgcattactttttcattcttatttgtgcaaataacacgtggcggaatataacgtcagaaagcctgcataaatggctggaaaaaatgaataaatggactcgttttcatcactgttcattgttggttattaacccttgtaataatagcgataaacagtcctcgttgttgatgggcgagtatcgctcactttttggcctcgccagtttacgttttcagggcgaccaacatttgttcgatattgccttctggtgtaacgaaaaaggcgtcagcgcccgacagcagttattgctgtgtcagcaggacgaacgctggacgctatcccatcaggaggagacggcaattcagccgcgtagcgacgaaaaacgcattcttagccacgtcgccgtccttgaaggcgcgccgccgctctcggaacactggacgcttttcgacaataacgaagcgctattcaacgacgcgcgcacggcgcaggccgcgacaattattttttcgcttacacagaacaaccaaatcgagccgcttgctcgtcgcattcatactttgcggcgccagcggggaagcgcgctgaaaattgtcgtgcgcgaaaatatcgccagtttgcgcgccaccgatgagcgcctgctgctgggctgcggcgcgaatatgatcattccctggaacgccccgctttcacgctgcctgacgcttattgaaagcgtgcaggggcagcagttcagccgttacgtaccggaagacatcaccacgctactgtcgatgacgcagccgttgaaactgcgcggttttcagccgtgggataccttctgcgatgccatccatacgatgatgagcaacaccctgctccccgccgacgggaaaggcgttctggtcgcgctgcgcccggtgccgggcattcgggttgagcaggcgttaacattatgtcggccaaaccgaaccggcgatattatgaccatcggcggcaaccgtctggtgctgtttttatcattctgccgggtcaacgatctggataccgcgttaaaccatattttccctttgccgacgggcgatattttctctaatcgtatggtctggttcgaagataaacaaatcagcgccgagctggtgcagatgcgcttattgtcgccggaactgtggggaacgccgctaccgctggcaaaacgcgccgacccggtaataaatgccgaacacgatggccgcatctggcgtcgtattcctgaacccctgcgattgctcgacgacaccgcggagcgtgcatcatgatgaccatcagcgatatcgtgcaaattattcttttttgcgcgctgattttctttccgctggggtatctggcgcgccattcgctacgccgtatcagtgatacgacccggctgctatttgccaaacctcgttatgtaaaaccagccggaactctgcgccgcgctacgaaagtcaaggcagacaaaaaatgactcagcatactcaaactccttcaatgccttctccgctctggcaatactggcgcggtctttccggctggaacttctattttctggtcaagtttggcctgctgtgggcaggctatctgaattttcatcctttactgaatttggtattcatggcgtttctgctcatgccaataccaaagtatcgccttcaccggttgcgccactggattgccattcccgtcggcttcgcgctgttctggcatgatacctggctgcccggcccgcaaagcattatgagccaggggacgcaggtggcggaattcagctccggttatctgctcgatctgatcgcccgttttattaactggcaaatgatcggcgccatcttcgtactgctggttgcctggctatttttatcacagtggattcgggtcacggtgtttgtggtcgccatcatggtatggctgaatgtactgacattaaccggcccggtttttacgctgtggccggcaggccagccaaccgatacggtgacgacaactggcggtaacgcggccgctaccgtcgcgacagcgggcgataagccggtcatcggcgatatgcctgcgcaaaccgcgccgccgacgaccgcgaatctgaacgcctggttgaacaccttctatgccgcggaagaaaagcggaaaacgacgttcccggcgcaacttccgcctgatgcgcagccgttcgacctattggtcatcaatatctgttcgctctcctggtcggatgtcgaagcggcaggcctgatgtcacatccgctatggtcgcactttgacattttgtttaaacactttaattccggtacgtcttacagcggcccggcggccattcgtctgctgcgcgccagctgtggtcaaccttcgcatacccgactttatcaaccagccaataacgaatgttatctgtttgataatctggcgaaactgggctttactcagcatctgatgatggatcataacggtgaatttggcggcttcctgaaagaagttcgcgaaaacggcggtatgcagagcgaactgatgaaccagtccggcctgccaaccgccctgctgtcattcgacggctcgccggtatatgacgatctggcggtcctgaaccgctggttgacaggggaagaacgtgaagccaattcccgctccgcgactttctttaacctgctgccgctgcacgatggcaaccacttccccggcgtcagcaaaacggcggattataaaatccgcgcgcagaaactgttcgatgaactggacgccttctttaccgaactggagaaatccgggcgtaaggtgatggtagtcgtcgtaccggagcacggcggcgcgctgaagggcgacagaatgcagatctcaggcctgcgcgatattcccagcccctccatcaccaacgtcccggcgggcgtgaaattttttggcatgaaagccccgcatgagggcgcgccgattgatattaatcagccgagcagctacctggcgatttccgaactggtcgtacgcgccgtggacggtaagctctttaccgaagacagtgtgaactggaacaagctgaccagcaatctgccgcaaaccgcgccggtttcagaaaacgctaatgcggtggtgattcagtaccagggtaagccctacgttcgtctgaatggcggcgactgggtgccttacccgcagtaaaccgaaaaaggccgcaaggtttcccctgcggcctggttcgggcgcatgttgccattacggcggacagacgctcaaaacgcgttacttcctgtcacgtagccagttgacgatcacactggcgataatgccagcaatgatcggcgctgccagatcgtgccagaagaccacgcccaactgcgtaagcgtcatatagccgccttgttgcaatggcaaccgttcgcggctatccttaaagtgtttgggttcaagttagcccccgtcaggttgccaggtttataccagtcaacgtgcgggggttttctctatccagcaacctatgccgccggggatcaaacccccgcaacattgcgcctcaccgggtaaacccggcttgctgctgatattacggcaaaatccccgtcccggcacggcgctaacgtgcaatctgcgtgacgcttcgcagacgattacttttatttgccagaatacattcagcatttctgaggctggcagtcagccgctcaattctgtaaattatgcctcctcgcggccagtcccggtgataccgaaaccctcgttcagcatcctgcgtctatgacatattcgcctgttgcgccagaggaatggctaaaagcaggtattaccgacgaacttatccgtctttcagcgggacctgaagatcccgacgatattattcatgaccttgaacgcgccagcagaaaagcagcattctgacgattgctcggcgaaccgctgtcaccggtttgccgcatcgggtatcaaggcactatagcctggttataggcagcattctttatgagagagctgcgtatattttgggcagggggctctatgcaggacgacacattaccattaaataacagtaacgctacgaccacaccgctttcaacgagattaccgtttacaaaatatgattttggctgggtgctcttgtgtatcggaatggcgatcggcgccggtaccgtcttaatgccagtgcaaatcggtctcaaggggatctgggtatttattaccgcttttatcatcgcctatcccgctacctatattgtgcaggatatttatctaaaaacgttatctgaaagcgaaacctgtgacgattatacggatattatcagtcactatcttggcaaaaactggggcatttttctcggtgtaatctattttcttatgattatccacggggtgtttatttattccctgtcggtggtgtttgatagcgcctcctatatcaaaaccttcggccttactgaggccgatctttcgcagtctattatctataaagtcgcgattttcgccgtgctggtggcgattgcctccggcggggaaaagttattatttaaaatttccggcccgatggtggtggtaaaagtcgggatcattctgatattcggtttcgcgatgatcccacactggaatcttgataatatttccgcctttcccgccgcatcggttttctttcgcgacgtactgctcactatcccattttgcttcttttctgcggtcttcattcaggtgctaaacccaatgaacatcgcctatcgtaagcgcgaacctgaccgtgtgctggccacccggatggcgattcgcacgcatcgcattagctatattacgctgattgccattattctctttttctcgttctcgtttaccttttcgattagtcatgaagaggcggtatcagcattcgagcagaatatttccgcccttgcgctggcagctcaggtaatccctggccatatcatccacattacctctaccatcctcaatatttttgccgtacttaccgcgttctttggtatttatttaggttttcacgaagcgcttaaaggtattgtactgaatgtattgagtcgtattatggatgtcaaaaacgtcaacccactgttactgacatctggaatctgtgtctttatcgtggttactctggttatttgggtttcgtttcgcgtctcagtattggtctttttccagttaggcagtccgctttatggcattgtcgcgtgtattattccctttttcctgatttataaagtagcgcaactggaaaaattacgcggcctgaaaacctggcttattctgttatatggaatattgttgtgcctgtcgccgttattaaaattgattgaataagtcgtaccggagagccatgcccggtggcgctacgcttaccaggcctacaggtacggtgtaggcttgataaggcgcagccgccatccggcataaaacgcaattaactcagcggtttctgcggattttcatcctgatcgacggcaaagcaggccaccaactggccgtcgtactctttaagctgcggctgtaactgcgtacagggtccgaagcgacggctgcagcgggcgttgaaggcgcagcccggcggcgggttcagcgggctcggcaactcgccggtcagcttaatccgctcacggcgatcgtccggattcagccgtggcgtggcggagagcaacgcctgggtatagggatgacgtggattgttaaaaatctgctctttggtccctttctccacgcagcggcctaagtacatgaccatcacttcatcggcgatgtgttccaccaccgacaggtcgtgcgagataaagacataagacagccccatatcctgttgcaaatccatcatcaggttcagcacctgggcgcgcaccgacacgtcgagcgcggagaccggttcgtcggcaatcactacgtccggatcaagcatcagaccgcgggcgatagcgatacgctgacgctggccgccggagaacatatgcggatagcggtcgtagtgctcggttttcagccccaccttcgccatcatcgccagcgctttttcacgacgctgcgctttactcaggctggtattgatcagcaacggctcttccagaatttgccccactttcttgcgtggattcagggaaccgtaggggttctgaaacacaatctgaattttctgccgccgcagtttctgcgcgtgcggatcgtgtttaagcagatcctgcccctggtaataaagctcgccgccggttggcgtttcaatcatcgtcagcaggcgacccagtgtggattttccacaaccggactcccccactacggccagcgttttaccgcgttcgagattaaacgacacgccgtccagcgcttttaccagccgttccggagaaaagatccccttcttcaccggatagtgttttttcaggtcgatagcccgcaacagcggctgttgcaaggtggcctcatgcgtactcatagtgtgggcctcccggcatcatcgagtgggtaatgacattttgactgacgtccatcgtccagttggttgagagcaggttcttccgcacgacatctgtccgtggcgtaggggcagcgcgggttaagcagacagcccgtcggtcggtcatatttccccggcaccacgcccggcagcgacgccaggcgcgctttgtcctgagcaaactctggtaacgcgcgtagcagtgcctgggtgtagggatgacgcggcgcgcggaaaatatcctgcgcagcgccggtttcgacgacctgcccggcgtacatgacgataattttgtgcgccgcttccgccaccagcgccaggtcatgggtaatcagcaccagcgccatgttctctttttgctgcaactccagcagcagctcaatgatttgcgcctgaatggtcacatccagcgccgtggtcggttcatcggcaattaacagctttggtcgacaggctatggccatcgcaatcatcacacgctgactcatgccgccagaaagctggtgcggatagacatccagacgagaagccggatcgggaatacccacctggttcaacaggtcaatcgctcgctgacgacgggttttcttgttcccgccctgatgtaccttgatggcttccataatctgaaagccaacggtatagcaaggattgaggctggtcatcgggtcctggaaaatcatcgccacttcagcgcccaccaggttgcgacgttccttctcggaaatgcgcttcagatcctgtccgttaaagagcaggttttccgccatcacgcggcctgggtaatcgataagccccataattgccagcgagctgacggatttgccggaaccagactcgccgacaatcccgaccacctcaccctgcttcacgctgtagctaatgcggtcgacggctttgaacggtgtcccttcgtcgccgaagtgcaccgataattgatctacatttaataacgccatctcgaacctcttactgcttcagtttgggatcgagcgcgtcacgcagaccgtcacccatcaggttaaatgccagtaccgtcagcagaatcgccagccccgggaaggtcacgacccaccaggcgctttgcgcgaactgcagaacgtcagagagcatggtgccccattccggcgtaggcggctgtgcgcccatgccaagaaagccgagggcagccatatcgagaatggcgttagagaagcccagtgacgcctgaacgatcagcggcgcaaggcagttcgggaaaatattgacgaacatctgacgcatcgcgcctgcgcccgccacgcgggaggcagtcacataatcgcggttcacctctaccagaaccgccgcgcgggttaagcggacatagtgcggcagcgccacaaacgtcaacgccagcgcagcgttgccgatggaggggccgaagatcgccaccagcaccagcgccagcagcaggctcggcagggccagcataatatcgaccacgcgcatgatgatgttatcgaccagaccgccgaagtagcccgcgaccaggccgagaataatccccattaccagcgacaggacgaccaccagacagccgaccagcagtgacaaacgcgcgccatacatcaggcgcgagaggacatcgcgaccaacatcatccgttcccagaatatgcgcccaactgccgccttcctgccagaccggcggcgccagcagcgcatcgcggaactgctctgccgggttgtacggcgcaataaagttggcaaacaccgcaatcaggatcacgatgagaacatacgccagcccgacgaccgcgcctttattgcgtttgaaatagtgccagaactcccgcaatggcgtcatgggcgccggtgcggcattaacattattttcagtaacctgtgacatgatggccccttacttcttatgccgaatacgcgggttcaccacgccgtacagcaggtctaccagcaggttgacgagaataatcatcgtcgctaccagtaacacgccgccctgcactaccggataatcgcggcgttgcagcgcatcgatcagccagcgccccagaccgggccacgagaagatagtttctgtcagaatcgcgcctgccagcagcgtcccgacctgcaggccgatcacggtgacgactggcagcatggcgttacgcagagcatggacgataatgacgcgcatcctggtcaaccctttggcgcgtgcggtacggatgtaatcctcccccagcacttccagcatcgacgaacgggtcatacgcacaatgacggccagcgggattgtgccgagcaccatcgcaggcaggatcatatgcgccagcgcatcaataaagttaccctcttcgccccagatagcggtgtcgatcagcataaagcccgtcaacggattggtatcatcaaggaacaccatatcgctcacgcgcccggaaaccggcgtcaggttccagtggacggagaccagcatgatcagcatcatgccccaccagaagataggcatagagtaaccggtcagcgccaggccaacggcagtgtgatcgaagatagaaccgcgcttcactgcggccagcacgcccaccggaatccccacggcgacggcaaaaatcatggcgcagacgccaagttccagcgtcgctttaaagcgaggcacaaactcgtcccatacagggattcggcttttcagcgagatgcctaaatcgccatgcatcaccccccagatataatggaggtactgctgccacatcggtttatcaagaccgagttcagccagcagttgagcatgacgctcaggggaaatacctcgctcacccgccatgatcatcaccggatcgccggggatcatgtggacaaaggcaaaggtgagaagggtaataccgataaacgtcgggataacgagtcccaaacgtcggagaatgaactgcaacataacccgaattctctctcatgacccacggcctggaaccgtgagtctgtattgctcacaaatcttatcccacgcaaactgcatcgcggataaagcattacgccggatggcgctgcgcttatccggcctacacaacaccggggcgcagcgctcttttaattattcgacagagacgttttcgaagtgatgtttgcctaatggatcaaccacatagcctttaacttctttacgcactggctcataaaccgtggagtgagcgatgatcagcgctggcgcctggtcatgcatcacaacctgggcctgtttatagagctcaatacgcttgttgtggtcatcggtcgcacgcgcaggctgaatcaggtcttcaaacggcttataacaccattttgaatagttggagccttgctgggcggcatcgcagctgaacagcgtggcgaagaagttatccggatcgccattatcgccggtccagcccatcatcaccgtctggtgctcgccatctttagcgcgcttgaggtattcgccccattcataggtgacaattttggcctgaacgccaatcttcgcccaatccgcctggatcatttccgccatacgacgcgcattcgggttatagggacgctgtaccggcatcgcccacagatcgatggtgaagcctttttccagaccggcttctttcagcagcgccttcgctttttccggatcgtagccatagtctttaatatcgtcgttgtagccccacattgtcggcgggatcaggtttttcgccgcaacgcccgcgccctgataaacggctttgatgatggcctctttattcacggcataggtcaacgcctggcgaactttgacatcatccagcggttttttctgcacgttataggagagataacccacgttcagaccggcctgctccatcaggttgatgtttttatcttctttcatgcgcgcaatatccgccgggttcggatacggcatcacctgacattcgttcttctgcagtttggcgtaacgcacagaggcgtcaggcgtgatggagaagaccagacggtcaatctgcggcttcgtgccccagtagccgtcaaaggctttgtagagaatgcgggagtctttctgatattgcaccagttggaacgggccagtgccgaccgggttcagatccactttttccggcgtaccggctttcagcatgttgtcagcatattctttggaaagaatagaggcaaagtccatggctaaatcggcaaggaacggcgcttccggacgcgtcagcacaaactgcaccgtgtgatcgtcgaccttcttcacttcgctaatcagatccggcagccccatgccttcaaagtattcatagctgccgccagacactttatggtacgggttctgctcgtttttctgccggtcaaaagagaacacgacatcatcggcgttcagctcgcgcgtgggtttgaaatccttgctggattgccatttcacccctttacgtaggtggaacgtataggttttaccgtcttcgctgatatcccacttctcagcaagacccgggatcacttccgtggtgccggttttgaattcaaccagacggttatagataggtacggagctggcatcataggtggtgccagacgtaaagagctgtgggttaaagccttccggcgagccttctgaacaataaaccagggttttggcctgcacgcttgctgcaacggtcatggccaccaggctcaaaccaagcttcagcatccctgacttcttcaaggaaatactcattcttctgctccaattgtgatgtatgttgttttgccctttgcaaaggcttttaccgcccggccttttttgttttttacctggtcaggtcagtagtgagaggtggggattccgttcgcataatcgactgagttgcagtgcggattctccataaaatgcccctcattccctacaatctgtcaatagaatgtcaaaacgtcaatacaggtaaccagcttttacaacaacggtgagaattaacaaacaaagattaaaaaaagttcagaagggtattttcagcagggaaatttgtgctatggccagaaaggcagagttattcacttaatattttgcaacagttagtgattaacaattagacattaattgaaaaatttctttcgatatgttgattatctgagcgattaataccactaacgctaaaacgcacaggcgaaaatgctgaggttatccataagccgtgtgcaaaaaagagttatacggacgttgaaaaacaccatcgaatatgtcacaaaattgtaaataagtaggccgtcgtgcggcctaccgcgatcacaaaaactaacttttgaccctggcctgcgtgcgcttttcgctccagttaaacaacgagttcaccagaatcgccgtcaacgtccccgctgccatgccgttgccaaagaccatctgtacgcccgccgggaaattctgatacaggccgggtaccagtataggtagcattcccatggccagccccatcgccagcgcgtaggttttacccggcgtatgcagtggctcacgcgcaatcatatcaataccgataaccccgataatgctgaagacaatcaccgccgtaccgcacaccaccgaacctggcagacaggtcgccagacgtaccagcggcgcgaatatggcaatcaggattaacaatcctccggcagccgcagtcacgaaacgcgatttcacattagtggtgcgtaccaccccaatattttcgccggaggtgataattaaggaggtgccaaaaatccccccagcagcgacattaccgcatcaccacgaatggtgcgtggaatcgcctgctgcacattttgcgtggaattgactatttccgcggtcgcaatcgtttgcccggttgcttcagccatagagatgaccgcgtaaatcagtaacggcagcgaggcggagagatcaaaaatcggccagccgaacggcaaaagctgtgggaaactaaacagcggcccgtgactcacaccgctaaaatcggtgctgcccagcgccattcccagcaacgttcccgctaaaaggccgaacatcaccgccagctggcgcaaaataccgctaaacgccagcgcgaaaatcagcgttatcaggatagtccccagcgataaaatgatactggttggatgagcgaagtcggcgctccctggctggccaatgatcaatccgccgtacaggcgaataaggttaatcgacaccattagcagcatgatgccaatgataaaagggggaaaatggtgcaggcagcggcggaaaatcggcaacgcgataaagtagaacagcgaggtcagaattacggcgccaatcgcggtctggatattggtctgtaaagcgatcgcaacgaaaatcgcaatcggcgcgccccccggtaccataataaacggcaaacgcgcgcccacccctttcacacccaggctttgcaaaatagcgcccagaccgcacatcagaaaggtcgcgctaagtaccgaggcggtcaccgtatcggtaaagtggagcgctttggcgatcagaaagacggaggtaatgggggtggcggcaacgaccagcacatgctgaagcgccaaaagtaaggtggtttgccagggtaatgcatcgttatccggcgtagtaaggccaggttgcggcatgattaactcccataaaacatcaaaaaaataaccgccagcgcgggctggcggtctgtattatttcaaccaactaatggcatcagcggcatagcgatgcgcacggaaggcgctgttctgttttccaggaataatgcctttactgaggtgctccggatattcattaaagaacggaatgatatattcccataccgtttcgccttccggggtgacttcaaacaggcggccaaacgccgattcacagataaaggtgttgccgttcgccagccgctgcgcgctccccatatacggcgagaaaaacgccggcgggaagatatcgcgatactgccaggtaatcgctttggtctgcggatcgaactccagcaccgtggaatgcggcgaggtgacgccgggacgcaggttgccgttatcgaaaaccagaatcgacccgttctccatctcaaccggcgtgtgctgctgcgctacgacttccggccctgcatgccagataaccttcccgctctctttatccacggcaatgacgccggaagtggtacgcaggctcatcagcaccaagccatcacgggtgacggacaggccgttaatcatcggccagtggcggcggtcgaaaatatcatgaatcgggaaatcttccggattcaaatgctcccaggcgcgccattcccagaccacttcaccgtcgcgattgacctctttgacgacgtcgctctgaatgatgccgtccggcgcatcgcggcgcgggtcgccgccggtaacacgggcggcgatatcggcaggcaacggcgacgcggcggtatacagcagattaccgttcgccaaccattgcgcatcatggtgatggtaaatatcttcgtaatgccagacgatttcgttatccggcgtcacttcgtagaagtcgccgccgtgccagagatcccacgccggatagaggttcgctgaagtgcggtggctgccgttataacccagattaccgttcggcagcagcaccgcatcacgcccggcgcgaaccggaagctgccactgatgcgcgacttcgccctgctcgtccaccaggtaaacccgcccttcggcggtttgcggcgcaaaaagcgtatagccgccaaagctcttcgccttatcagcgtagataaggcccgccagacggcgtccaagggtgaaagtcgaatcctgagttaagtgtgccacatcgcctcctgaggaataaatttgcgccaaaataccccattaaaacgttttaatgaagggttttttacgatcctcactgaaaaaaagcaaacgttaccgtctggtaaatatgctaccctgtgcgcaaattttcgcaggtcaggaagcagatggctgttcaaaataaaaaacgcgcaaagttgattgatgttgcccgccatgcaggcgtgtcgccagggacagtatccaatgcattgcacaacactcgctttgtcgagccgcagacgcgacggcgtattgaagaggccattgctgcgctcaactacacgccgaatattcgcgctcgccagttacgaaccggcaaaaccaataccattgctttgctctcttcggtgccgctggcgattgcctccggcgcatcacgactgggatttatgatggaggtggcgttaacgtccgcgatgatggcgctggaaaagcagcatgcgctgattctggtgccgccgggggcaaatccactggatgccgtcagctttgacgcggcgatcctgattgagccggcggagaacgacccgcagctccaggcgctggcgcaagcgggcattccctgcgtcaccattggccgcacgccggggaccgacacgcctgtgccgtgggttgagctgcactcggcggcaacagcacagcttctgctaacgcatctggagacctccggcgccagcaaatgtgcgttatttgtcggtaacactcggcgaacatcagttctggagagcgaagcggcttaccagcgctggtgcgcggggcgccaggcccccgtcgtctactctctcaatgaaagcgagggtgaaaatgccggctaccaggccgcgcagcagctattacaggcgcatcccgacgttgacggcgtgctggtgctgatcgatacctttgccagcggcgcggtacgcgctttccaggaacaggcagtcgctatcccggagcggatgcgcgtggtcacccgctatgatggtatccgcgcgcgcgaatcgctgccgccgctgacggctgtgaacatgcatcttgatgaggtggcgcgacaggcaatcacgctcctgtttgccgttttgtcgggtgagaagatcagctacagcgacgggatcatgcctgaactggtggtgagagcgtcaacctgccggtgatagaggatgactcgccactacgtggctcgccctgcgggccgttgctgacgcaacgttctctcgcttcgctcgagtcgaacctcttgcccccggaggttctcatcctcgtcagacttcagatacaaaaaaaccctgctcattgagcagggtttctgaatttggtcggtgatagaggattcgaacctccgaccccttcgtcccgaacgaagtgcgctaccaggctgcgccaatcaccgaatgcgggcgcatcttactgctcaggcgcacgcccgtcaatcccttagtcgcaaaatacaattcaatcggcgagaaagtcggcagacaacctacttcgcggcgactttctgcacatcgggaatatggcaccagttgttgttctggttaatgccgccattcggcgatgtataccccaggcagcccattatcgtatcgtatagctccacatgacgacgcggcactttgatctccgcctgctgtttcaggtgagcgaacatctgcgcatgttgcggactggcaagatatttatccgacatccataccagcatcggaacacggaattgctccggcggcgccatattgcgcggcgtaccgtgcaaatgttcgcgttcgttaatcgactcgccgtggtcagccgcgtagaacacaatcgcttttttatcacgtagctgatcgaacacactggtaataaagtgatccacataggtcacggagttatcgtaagagttgatcatctgcgctttcgtgcagccgctatcgaccccaatacattcgggcttccactgagcgtagctgcgcggataacgctgcgtatagttaaaatgcgatcccttggtatgcaggataatcagatgcttaccctccggattctgggcaagcgagttctgcatctcatcaatcaacagcatgtcatccaccgttttaccgcggttacgcggctcggcgccaatctgctcgcggtaagagatattatccgccatggtattgctatagaaccacatctcgctctgcatggcgtacagatcggaactgaatccgagctgtttgagtacggcaaaaacattctgctcttttaaggtacgctgcgggttattatccgccccgccttcccgtacaaacatacagcgtaaagaaagcttcgtcgcggtatcgcaggaatagccgcggaacgccgccagatttttttcctgcgccagcttcggcgtggtattacgctcgtagccgaaaatccccatgtgatcccaacgggtcgtctcaccgataatgaaaacgacgtaggtgtcatccccatctttcggcgcaacataggtaaatttcctggccgggtttattaacgaattattgtccgacgactcatctacctgcgcccaggcatacagccctaacgcagataaccagtttgagggcaggtaggagttcgccaccacgccgccatagctgggtaagtcgatgcctgtcgcccgttcaacctttttttgctgtatatccagcaggcgaataggcgcccacaccattacgcctgcgagtaccactacagcggcgctgcgaaaacgctgccccggcgtacgtagctggcgcaacaacgtgtagcgacagtggttactccagataaagatgagcggaagcacgctcacggcaatcagccacaatacaaagtgcagccccaccacctctttcgagagatcgatatcggtggtcataacagacgcaataatgccgtagccaatcaccacgttcaggaaggtcatgtaataactggcgccagcggaaaacagcaccaccagcgtggccagcacacgccagacgcgtcggccaaacagtgaaagaagacgaagtaagaagaaagtgaccagcaccgtggcgcccagttcgacaactgcggagaggcctttccaaatggtaaattcttgtgcataactgccgaaacggcggtaaaacacggcgcaattcataaacagaccgatatagagcgcaagcaagaaactaagtttctgttgcgtcatcgatttaatgtatctcatgcaaacaaaccctgggaatcgggataaaaacgacctgtacaacgattctttaatcaaacaggtaaatatgcggctaacgcagatgtaagaaagtctacaagcacggttaagtagaccacaagcagaggggaaagtggcaacggagagtgtgatcggagaagatttttacaaaaaatcactaaaaatggaaaagggccagcgaactggccctcagtgattattcgtatgtgacgctaaaattcaccgtcgcattcgctgtgccaacggtggcatccggcttaacaggcacatagctggcgatatagttcagcttgttcgtaccatcaaaccagacagtgtgttcgacaggcgtagagtcggtactggaggggtattgttgctccccaccagatgttttaatttttaacgccacgcccgtcgcgccgccgctatccagggcaaaaagcgaggggtcagtcgggtccggagaaccgtccatcgtaacgctggcctttgtggcatacgcgcaatcttttaagccgatgctaaagtttttctggttcagctctttacccacttttaccgggcgctgaagcaccacggtctccatattgacgtcgatactgtcgttttccagttcacaggtagccgccttaatagtaatggtaaagtggatatcaccagcagaaccgatattcgacggtgccgccatcgcggaagcggtaagcagtaaacacgctggcatcaaagcatgaaggtttttcatcctgcttactccacatcaatacgcatggtggcaattccctcgaaatccccggcggccggcaatttgccggtggtactgatagggtaagccgaaatggtcgttgaggcggtacggtgcgtgtcgtcaacaagacccgatacgctcagctcctgattaacactggcgtcatttggcaccaaaattttaccgttagcgccctcaatgacggcaccgatatccgggttgcccatgtcgatggcattcgaatcattagcgtttggcattccctcaatacgcaggaagatctttacgccatcggaaatattggtgcatttaaactgcagctctttggtgaatttcgtggcgttctttgcaacttgtcctttgcgatctttaaaatcagtggccttaaattccccaaacggaatttccagcgtgctgccgctggagagttcacagccctgaggtaccgtaattgaaccactgatatatacagacgacgcaggtatactgccatatacactgggtttctttgtcacaaaaaggtccattattttggtgctaggtataatactttcacccacaaacggatggagaatatagagcgataagtgacctttgccaccggatgtccatattgcatctttactacttgcattttgcgaacactgagagcggttgtttgtcaggttacctacggtgtgttaacgtattctcctcgtccccccgaaatcagtacatcgctcgcaatggcaatattattattgatctggtaataggagcgactctctatattcgtaacaaaggccagaggaaccacagccttaaataaggtgtcatttataagagaggtatcatcagggcattcacaggacatcgcataggttccacctaaattccagctatcgaaatctacgaaggtcgcacccgttgtgttctttgacgtatctgaaactgttttatttatggtggcactgaagatatgtgttccaccttcaggagtacatggtccaaaatctgccgctgccagcgcctgccccgaaaacagcaccgacccgcccaacaggcccgtaaacattatcaactttttcaacataatcgtttccttccctgttaccggcagacggcattcgccatcaccacgccggtattatcctgttgttccggcagcgtaaacgccacgcggcattgctgtgcctggtctttaccccagttcacctgaagggcacctttctccggcatcccgctgatataaagctgaccgtcttcacccacaatgctgctggactcttttgtggtatccagcagcgtggcggtagcaccaaacggcaccgctttgccattggcctgcgtcagattcatcagcacacgatagcccactcgggtatcgaagcgggcacgaacaatcgcgccgcgtgtcggcactacgttgacggaggcggtatccaggtcaacctggttgttcaggctgtcgcttcgcagtgagacttccgtttcacggtacggagtaaggtaaggtacgaccgcattacccatccagtccacttccacaccaccgttgttgatcacgtgcgcgccgcgcgcgcccggcgcggagataatggccatggattcacccagcggttgagaaagagtgataccttcgctatgggctatcacaccgccgcgcaaaccgtagttcacctgctggccgtcacggttgtagttgtaacccaggctggcgctacccacgccgccctggtaatccaggttcacgctgccgctgttacccacgccgttgctgccgtagccttcctgcacactatagttcaggttgtggtcttccagcgcggtgccgctcacccctaactgctggttggttcggccatgctgatcggtcgtgaggtggtagttactccacacgcgtcccagtggaatcgacatggagaatgacagtaaacgatcgctctcatcccactccgggcttttcgtccaggtgtaagcaacgctgtagttcacgcggccaatacggccgttataaccggcattcagcgaacgctgtttaccttcatcgttccagtagtcctgctgcgtgacgttaaaatagaccgagccccaggcgcccagttgctgcgtcacgttgccctgaatctgactacgtttgtggtactggctataagagctgtccgcatcgctgcgcacatccgtcgcttcctggaaggtgtaatagccgctggtcgaatacttgtaacccagcagacggaaatctgtaccgctgttaaagctcttggagtagaggaaacgataagactgaccttccgaattctcctcatttgccagcttgctttttgcctgggttacatcgatggagatcgcgccgatataaccgaagtttttacctaatcctcccgccagcgagtaatagtcgtcagagaagatcgcaccaccgtaaacggtaaagccatacggcaggccgtacatggcatcaagctgcccgaatttcggctcggcgctgttatagttcccggcacggtattccccggcggaaaggctgtatttgagatggccttcacgctggaggagcgccaccgaggagaacggctgaacgaacttctgctcactgccgtccgattctttaatggtgaccgtcaggtcgccgctgtttgaggttggatacaggtcgttaatttcaaacgcacccggctgaacaaacgtacggtaaataacgtagttgttctgctcaacggtaacttcggcgttacttttggcaataccccggatgacgggcgcaaacccgcgctggctgtcaggcagcatctcttcgtcggaagttaactgcacaccgcgcatctgaacgctgtcaaaaatatcaccggcagtggaggtatcccccaacgtcagctgtgatttcagcggtacaatggcacggcttaaggatgtgccaatgttatcccatgtgttgttaccgtcgtttcgcgtccaggtgctatagttacgtaaccgccatgcccccaggttcataccgctgcgcagattcagatagtagctgtcgctgttgtagctggtttcactgtcgtgtgcgtcatagctggcgttgctgccggaaaagttataatccaccagcagggcattcaccccttcgtcccactgcgattctggcaccgtaccgcgcgctgtctgcttcatcgcagcctgcgggaagctcatgatcagggtctggtctgcaaagtcgaaatggctggcggcctggggaataatgtcgtcaaaagcaacacaggcttcaggcggggccattttcagcgccgggaagctatcaatacgcacgcccatatcttcaagctgcacgcgacttaagcacggcaccagggattcacccatttttgcgcgctgcgcctctgtcgctgccttaaactccagggtgcgagactccatttttttttcgttgaccaccaccgagacgcggtatttacctggcaggtgttcagctttattggattcatacattgaaaggtcaacgtgctgatcaatacccggcacatcctccagaaagcgcgggttaaatgttcccgcatacgcggggagcgtacccgctatcatcagcgcaagcgcagactgcgtgaaacgcgaggtcttattgcccagaggaagatgcgtccatgtcatagtaataatcctttaaaacgtgttagttaacgcgctgtgtcaacatgtcgccagcagtgccaaagtcattaataatgttgtatttaacttcgcttaccttgccggtgccggctggcagttcaatattcaatgagccttttgccggaaccattcccgttttttcaatatcacggccgttggcataaaatttattaaacgtcaggttaaaggcagatgggttttccactttgatctggttagcccctgcgctggtgaactgcagtttgttccagccgtccatgctattgcctttcaggcccgccgggcgatagaacagttttaagcgggtacgtacggcgatctgcagtacgtttttagcttccgcgtcttcacttttggcaggaatagcttttacgttaatccaataaacggactcgcgatcctgcggtaacgtgttcgtcgtattaacaatacgtaaaacgttatttttagtcgggcttaatttaaataacggtggagtgatgataaagggcgtctttttattaccgttagcatcatcaatccatgactgaatgagaaattcatccgtggtgcttttattatttaccgtaagagaagcttcctttctactaccgtcataaataacacgcgtgctgcttaatgccacgcctccggcaaaactgttttgagcaatcaacgccagcaccagtgctgtgcaagatatcaaacgtgagcggttcatgattctcttcctgagcctccgctggaaaaaatggcaacgggatttccgttgccattatgattgtctgtattaacgaaaattcgattattcgtaggacaggttgaagtccacttctgcgttaccgtaaccagtggttacagtatcttttgttgcaacgtagttagcggtgtagtacagcacggtctgaccagcagccaacgtagtggtggatttaccggtgttcatttcaacaagcttgttagcgttgtcgtagataccgatgcccacgccagttgccgcacctgcttcagtgttaacagaaaccagtgtcgcatcgtctgtatcaccaacgccattgaagcttacgttaactttggtattagaggtgatgtcacagtcttccagtttgatctggaaaggcttagaagaagacttgtcgccaatggctttgaagatatttttcttaacctgacccagcacaacttcctggttctgggagtcagtagaaacgacgcatggcgcgtcaacgatttcaccggtgaatttaatggtgccgtcaccagattcagcagcgaaagcagaagtggaaactacagcgagagcagacagagcaaaaacaacctttttcattaaaaactccatttatgacggtagataacagaacgcatccttaggattatctgcattctgtgaggaaatggagtgtatagaggtgggtattggatactataattagtatatataaaaataattgttagttaatcttaaaaagaatagaaatcaatatattacaaatggaatgtacataaatgtaattttttattaagaataaattaatataattaatatattatttcttcctattcataaataagttaaatgtcttccttatttattagacgtttttttaactacaattgattaggtatttgtgctaaataaaaaaaagggcaccaaatgggtgcgctgtacgcctggtgttgcatgtgttacgcagacgcttcgctaaccccctcccgctgcggctggcgaatagtggtggaaagtgccagcgagataattaacagcgcaaagataacgcagaaggttagcaccctacttccgccacaagagctgttatcactgcgtttcgattataatttttaagttaaaacctggcgctcacccccaaggtatacaaataatcgctatccgtagcgctattttccgcctgggaaaacgccgcatacgccgccaggtgcgggttaagtaacacgtccgcgcctacggtgacatccagccagtttcccgcctgatttcctgcggtcatacgactcaacccggactgcgctttccagatattctccccaaactgttggttatagctgatttgcgcccagggacggacatcgccgaactgcgagtttacccgccagcctaacgtactgacgctggcgtgccataacggatcggtaaacgctaatgtcgtcgcgctatcgccatattcgttatacattgatgacgtcgaaccgtcgtaatgcagcgccgcgaccggcccagtggtcacgcgtcgggaaagcggaaaattccagcccatactgataccgctggtcgcatcaagcggggtttcatccgccaggctaagcaccggccccaccgtattttgcgtagactgaatacgttcggccagtatgtcgttgtaattcggttggtgatcgctgtcccaggtatagcgttccgtcgtatgccccggagccgcttcagcgatatattcttgttgccaggcatatgtggtattgataaaaaacgagcaggccataaggcccgccagacaacgcaatgtccggcgaccacggcgttttcttacaatcatcaacgcgactccagagtagagccgaattcggcgatattattgtcattgaatgaaggatgtcgggcatcagccctgtattaactattgtccttttagcgggcccgtcaaggcgggttgaaggaaattttcgcggtaaccacaataacgaggaagtctatgcagcgttgcgactgggtcagccaggaccccctttatattgcctatcatgataacgagtggggcgtaccggaaactgacagcagaaagctgtttgaaatgatctgtcttgaaggtcaacaggccggtttatcctggatcaccgtgcttaaaaagagggagaactaccgcgcctgttttcatcagtttgatccggtacgcatcgcagctatgcaggaggaggatgtcgaacacctgctgcagaacacgggcatcatacgacatcgcggtaaaattcaggccattatcagtaacgcccgcgcctggcttgcgatggagcaaaacggcgagtctttcgccgattttgtctggtcattcgttgatggccagccgcagatcacccaggcggccagcctggatgagatccctacctcaacacctgcgtccgatgcgcttgctaaggcattgaaaaaacgcggtttcaagtttgtcggtacgactatctgttactcctttatgcaggcgtgcggactggtcaatgaccatattaccggctgtttttgccatccgggagaaaaacatgattcgcaaatcccagagtgaagacatggcgtctattctggcgctgtggatgaaaagtaccatttatgcccatccctttatcgaagaacgttactggcacgagagcgaagcaattgtacgcgacgtctatttacccgccgcgcaaacctgggtatgggaggaaaatggacaactgaaaggcttcgtcagcgtactggaagcccgttttgtcggggcgctgtttgtcgcccccgacgcgttaagacacggcattggcaaagcgcttctggaatatgtccagcaacgttttcctctgctgagccttgaggtttaccagaaaaatcaatccgccgtaaacttctaccatgcgcttggttttcgtattgaagatagcgcctggcaggaggataccgcccaccccacctggattatgagttggcaggcggatcaaacgccgtaagcggtagcgccgggccggtatatttctcaaaccagaccagcgcggtgttgcccgcacaaccgttccccagccgggaactgggaagatcttttgtcaggacgtttaccgcaccgtttttgcatatgccgcctgcggtaggttcagggtccggccatgcgccttcgtgaatacagatcacgccaggccgaattccgtcggtaacgaccgcgcccgccagaacctgcccgcgatgattccagacgcgtaccgtatcgccatcgacgattccgcgcgttgtcgcatcctgcggatgaatcgtcaccggttcgcgtccggccaccgcataccgctcccgtaacgaactgtagttaagctggctatgcagacggtgcgccggatgcgcggaaagtagctgaacctgccccgcatcggcgttcccgtgccactcatccggcgccagccacatcggatgaccgggacaatccgcataaccatagctggcaatgcgcgcagaatagatttcgattttgccgctggccgtttttagcggatggttatcaggatcgcggcgaaaatccgcgaagcgcacaaactgcgcgttggcgggattttccggcatctccagtaaacggttagcctgccagaatgcggcaaacggcggcagcgtcaccccctggctggcgccacgctgggcggcaatattgtagaaagtctccagccacgccagctcgctttttccttcggtgaaccgagcgtaaccgccggcttcccaccgttcgctcagttcagcaaaaacgtcaaaatcattccgcgcctcccaccggggcgacacgacctgcttcatcggcgccaaatgctgattgctatagtcgccggtcatggttaaatcgttacgctcatagctagtggtcgcaggcagaacaatatccgcgtgtttcgcggcggccgtccagaaacattccgagataacgaccagttccggtttttgccacgcgcgaatcagacggttggtatcctgatgatgggtaaagttcgcgccgcccgcccaccagataaaacgaatatccgggaagcggcgatccatcccattgtgttggtaaaacccaccggggttttccagcgcctcgacaatacgcgccaccggtattttatctaccgcatcgaccccgccagggatgcttccctgcatcgaggctaacacggcggcgcggcgcgtcgggtttccgccgttagcaaaatgataagaaaaaccaaacccgccgccaggcgtaccaatttgccccagcattgcggccagcgtaacgatcatccagtgcttttgctcgccgaactgctgacgctgcattccccagccagccatcaacatggtggtgttatgatgaaatatttctgccagttcgcggattttcaccgcagaaacgccgcaaatttccgccgcccattccgctgttttggccgtaccgtcggtcgtgcccaaaagatagtcggcgaagcggtcataacccgttgtgcagcgggcaaggaacgcttcatcctgccaaccgttttccaccagcgtatgggcgatccccaacattaacgccacatcggtgcccatatgcggggcgatccactccatcttatcgccaaaaaagtcgacgctttccgatcgcatcggatcgatgcagatcaggcgcttgccgctttgtcgcaacgccgcaaaatagtcgagcccctgttcatccgaggcattccaggcaattttcagagtattcagcgggttcgcgctccagagcaccaccacctcgctgtgttccagcaccaccggccagctagtctgctgctggtaaacctcgttgccacccaccacataaggcatgatagcctgcgccgcgccggtggaataatcgccaagatggccggtataccctcccgccagcgccatgtaacgctgcaatagtgtagccgctttatgcaatacgccgttcgaacgccaaccgtaggagccggcgaagatggacgatggcccataactttcgcgaatacgtttgtgctgagcgtggatcagatccagcgcgtcatcccaacttacgcgaacaaactcatcctgcccgcgtatgccttgcggcttatcgggagaagccaggaaccctttacgcaccatcgggaagcgaacccgcgttttactgtgcacctggtcatgcacaacggtttgcagggagttttggtgtgccgtcgggagttcgccatacgaggcaaaaatgcgttctccgtcggtttcaacgcggactggcccccagtgtgcggcggtcaataccgagtgacgcgatggtgcgtgggtcaatgttcgctcctgaattattgggattatttattttgccgatcaatgttacttacaaatttcagagttttccctggaattttcttcatgtgcagacgtcataatcaaccgccacggtcgctgtggtaaaaataaaaaagtgataaggatttaagatgaaaaaacgtgtatttgtgattgctgccatcgtgagcggcgccctggcagtatctggctgcacaacaaacccttacaccggcgaacgcgaagcaggtaaatccggcattggcgcgggtattggatcgctggtcggcgcaggcatcggcgcactctcctcctccaaaaaagatcgcggtaaaggcgcgctgattggcgcggcggctggcgcggcgctgggcggcggcgtgggttactacatggacgtacaggaagcgaaactgcgtgacaaaatgcggggcacaggcgttagcgtgacgcgaagcggcgataatatcattctgaatatgccgaataatgtcaccttcgacagcagcagcgcgacgctgaaaccggcaggcgctaacacgctgaccggcgtggcgatggtgctgaaagagtatcccaagaccgccgtcaatgtggtgggctacaccgacagcaccggtagccacgatctgaatatgcgtctgtcgcaacagcgtgctgactccgtcgccagttcgctgatcacccagggcgttgacgccagccgtatccgtaccagcggaatgggtccggcgaacccgatcgccagcaacagtacggcagaaggtaaagcgcaaaaccgccgcgtcgaaattaccttgagtccattgcagtaaactaccgtaccgggtaaggcggcatgctttacccggcctgcattattccctcgccagaccggatacacctcgcattattcggtattcattcaccatttaccacgatacggctgccgacaacgggaaaatcggctggtcgattattgctaagcgggttaataataagcctgttccggttggcgcatgccgcgcttaccttttgatttacggagagtcgcatgaagccgtccatcattctctacaaaaccctgcctgatgatttgctgcatcgcctggaggcgcattttaccgtcacccaggtaccgaacctgcatccggaaacggtagcgcaacacgcgcaggcatttgccagcgcgcaaggccttctgggcgccagcgaaaccgttaaccgcgcgctgctggaaaaaatgccggcgctacgcgcggcgtcaaccatctcggtgggatacgataatgtcgaggtggacgcccttactgcccgcaaaatagtcctgatgcacacgcctgccgttttgacggaaaccgttgccgatacggtgatggcattgatgctggccactgcccgccgcgtggtggacgtcgcagaacgggttaaggcgggtgaatggacagaaagcattggcccggcgtggtttggcgtcgatgtccatcacaaaacgctcggtatcgttgggatggggcgtatcgggatggcgctggcgcagcgagcgcactttgggtttaccatgccggttctctatcacgcccgtcggcggcatcaggaggcggaagaccggtttaacgcccgctactgcgatctggatacgttgttgcaggaggctgattttgtctgcgtgatcctgccgctaacggcagaaacgcgacatctgtttggcgcaacacagtttgccagaatgaaatcgtccgccatttttattaatgccggacgcggcccggtggtcgatgaaaacgcgctgattgccgcgctgcaaaacggtgaaatatatgcggcaggtctagatgtctttgaacaggaaccgctatctgtggattcgcccctgctgaacatgtctaatgtcgtcgcggtgccgcatattggctcggcaacgcatgagacgcgctacaacatgatggcctgtgcggtggataatttgattgatgcgctgcagggaaaaatagagaagaactgcgtcaatccgcaagcggcgggataacgctacaggcccgataagcgctggcttgcgcttatcgggcagactgtcattactgggtcgcgtttaccgccgccgtccaggcctgattaaacgcctgatgctgcgaggccaacggcccaatcaacgcattatattggctggcctgctgtgaggtcgggaactgaatgccgttcgcgacaaagctcacctgctcgccctgttgcgcaatataatcgcccacttgtaccaactgctgcgtaaagatctgcgccgccgggatcagcggctgcaaagcatctgccggcacggtgactacttttttgtagacctgatcaaacacaggtttcaggtcatcggcctgctttaacgcgccatgcgcggcatcagcctgcagttttgcattctgcaactgttgcgccagcacgcctaacgaaccatttgcctgccgcagcggctcgcgttgcgtcatataatcctgcggaacgcggatggcgttaacgctatcgaccaccgggcgcagaccggaatccatcgcctggtttacctgctgcgagtagccatacagtatcgcgtaatcagacacgaacggaccaaactgttttttctgatcggccgtcagcgttggtaaacgctctccgctacgcattgctgtattctgcaggaaatcgacaaacgctttgcgctgatcgccttctttatcaaaacacccgctcaggctaaacaccattaataacgccacaacaggcgcaaaccagcgagagcaggacttacctgtcgccattgttaatactcctttcacccaaaaatgcgcacaacgacacctgcgtgcctgacggcttacaaggatagtccaggtcaggcttgcaggataccctttccacgcgatcttgtagcggaaaattatgtttatctgcatcaatgcttaatttgttattttattgttaatttttgacctgacactgcgataaaaaacgcggcaagaaagctttccagcggggagtgtaatatttttttaatctttacaattattttctgaaagacggatataccttcctggatcaaattgttagcgtcctaaaagtcgcgtagcgtaaggcatcgaaacgaatcgatagcgcttcctggcggcgcgtcgccccccacccgcaagtttcccgactattcttaagaggcttcgatgcatttcacgatcccgctgtgtgatttacaggagttctcaatggaatataaagatccgatgtttgagctgctgagcagcctggaacaaattgtttttaaagatgaaacgcgaaagatcaccctgacgcaaaaacccaatccttttaccgaatttgaacagttacggagaggaacgggactaaaaacagatgaattcgccagagcgctgggcgtaacggttgccatggttcaggaatgggaatcgaaacgcgaaaaacccacgccagcagagcttaaattaatgcgcctgatacaggcgaacccacgcttaagtaagcaattgatggagtaatttttacccctttctgtttttaacggtcctgcgtaaggaccgttttccccgcccgattactggcctggagaaataaagtaaaataaaagttgcatcgcccgccattacatgagttaatgtgctcaacggtttgacgtacagaccattaaagcagtttagtaaggcaagtcccttcaagagttatccattagatacccctcgtagtgcgcatttccttaacgcttaaaaaatctgtaaagcacgccataacgccgaaaggcacacttattttttaaaaggtaatacactatgtccggtaaaatgactggtatcgtaaaatggttcaacgctgataaaggcttcggctttattactcctgatgacggttctaaagacgtgttcgtacacttctccgctattcagaacgatggttacaaatctctggacgaaggtcagaaagtttccttcaccatcgaaagcggcgctaagggcccggcagctggcaacgtaaccagcctgtaagcttaaaaagctcagcattttgaatccctgcctgatggcggggattttttttattccaattcccccctctcccccagcataactttgcattactttaccctgcgtccctttgacctttcccttaggggaacccctatagtaggcagggagattgttcacaaggaattgaagttatgtcgaaatcatcatggttattacttttgggtttatgcgccagcggctccgcgcttgcggcatcctcagaatccgcttttctggcgcaacatgggctggcgggaaaaacggttgagcagatcgtggatacgattgatcagacgccgcagagccgtcctttgccttactccgcgtcgattaccagtaccgaactcaaattatctgacggagagcagatttatacgctgccgttaggcgacaaattctatctctcttttgcgccctatgaatggcggacacacccctgttttaaccacagcctttccggctgtcagggagaaatgccgaataaaccgttcactgtaaaagtgacagacagtaaaggcgctgtcatcgtacaaaaagagatgcaaagctatcgaaacggatttatcggtgtttggctaccgcgcaatatggaagggacgctggaagtaagctacaacggtaaaacggcgtcacatgccattgccaccagtgatgacagccagacctgtctgacggaattaccattacgttaaaaaaatgcccgataacataatgggttatcgggcctataaaacgccaacaagataaaattaacagagtgccttgagaatgcataacgccacaagaatggcagaggtgggctcactttgtactgaccccaaaaacctggacagattaaccgaggcatcagcgaaagagtccatttaatacatgggctcttttttgtttctggctataactaaataacattgtccgcaatcgaattatccattccgttgctttcttgcatcacgcggattcctgtctcatcaatattttgttcgtcgtattcttcctgaatttaaccttagacattctatcaaattatcgcttatagcgatttgaacataacagtctttgcattctattgagggagcctaaggaacaatgttcgctgctgagtttgtgatgatttgaaaccatggtgaatgtagaaatttttggcttcttcggtaagtgcatgaaccatgattgcacgtacaccaatattctcggcaacccgatagcaacgaagcactgcatcatgaagtaaatcagcaccaagcccttttccatggaatgagagatcgacagcaagacgggcaagtataatgacagggatgggatctggcatgttacgccgaaggttgcctgtcgcttctgtatggttgacgctaccggtggccagagagtaaaaaccggctacttgcttcgtgtctttcttgcacaccacaaatgttctggccgctccgagagcctggtttttgaggcccttttgcttcaaccagtcatcgagcacagcttcaccgctgacgaactcagctacctgatgaaaagcggacaaaggttctggtgctgttacacgtcccactgaggtttccttgccagcagtttttcgataacgggatcatctgcgaccggtgcatcaagcagattgatgaactcctcatattgctcatcgttaaagttaaatacacggcggtcaaggatcactttctcggcagcctggcaggccgtttccagaatgaaatctgtacgtgacttgtgaaggatttccgcagctgcatcaatgagcgcccgctgcgattccttagctctaaggttaagttgaacatctgatttcatgagacaccccttgtatagcatttgctttacaagaatagcacaaccaccatgtatagcaaacggtatacatcaagtcgtcgtttttcattttttgaatactgatgttcgctttgtgccagaagcggaaattgctcattgtagcggtttactgagttcaacaaggcaaaagaacaatgctgcctttctgcaggctgactattatttcgccaaacatttcctcatcagagcattttgtaatgtcactccacggcaaataggaaagcctcgctccactatatgaaagccgtgtcgtagaaagaacacttccgcagccttacttacatttgaagtaagttcactaattccacgctgtctggcttcctcatgaatgcaattcatcagtagtgtccctaccccctgtcttgaataggttcctgatacaaagaaatgatcaatgtatccatttggttgaacatctgcatatccagctatttcaccatccagctctacaacaaaaggttgtaattccttaatgtgattggcccatcgctccaggtcgatatctgctggggcccaagcatcaatttgttcacgtgtgtagtagtgtgatgcgatcgtatgtacagatgagaaaaaaactctgaataacgatatttcatccccattactgaaccttctgattttcataaaacctcattgtgagagttacttgtagaacaatactaatttttgtgaaatagggcgtccgttcctcgctcatagcagacatttgcgtgaccgtatccaccaacgttcaggtttcctgatagcatccctgtacagaccttgttaatttctgcctggatagctctttaggcgctattcaaccgggctgagtccgttaaatttaaggctaattcgtcgggtattgtagtatcgtatgtaatcctcaatagctatcttaagttcatcaatatccttaaatttactggtgtaaaaactttctgattttaaagtcccgaaaaaacattctgcacaggcattatcaaggcagttgcctttgcgggacatactttggatgatgccaaactctcgtaactgatactggtaccatcaatgacggtattgccagccctgatctgaatgaagaaccggattggtacccgcatcaagtctggcagtaccgccagcgttaatgtattcctgaaataattcttgccaatcaatagagataaccgcgtctatgagttacagaattattagcgaatcaactaatactatttatgttataaaaaaacctgcccgagagcaggtttttgtttatttaactgaacgcttattgaagtaacgaaatatccgcaacctgcaggaacagttcgcgtagtttcgacaacagcgtcaggcggttgatacggatatctttctcttccgcgttaaccatgacattttcgaagaattcatccaccggagcgcgcagagcagccagctcaatcaacgcttcctgataacgaccatcggcaaagtacggctgaagcttatcacgcagcacaaccagatgtctggccaactcaatttccgccgcttctttcagtacggaggcgtggacgatatcgttcagcggctcagtggctttcgccaggatgttggagacgcgcttgttcgccgccgccagcgcagaggcttcttccagggtgcggaaatgagacaccgccttcatgcgggcatcaaaatctgccggacgggtcggacgacgcgccagtaccgcctggatagtgtcgacggtgtaaccttcatcctgataccaggcgcggaagcgacccagcataaaatcgatcacatcatcgactacgttggcattggtcagcttgtcgccatacagacgcaccgcttcttcggtcagcgtttgcagatcaagagcgaggttcttctcaacgatgatgcgcagcacgcccagcgcggcacgacgcagcgcaaacgggtctttgtcgcctttcggatgctgaccaataccgaagatacccgccagagtatccatcttatcggcgatcgccagcgcgcaggccaccgggttagacggcaggtcatcaccggcaaagcgtggctgatactgttcgttcagcgccacggccacatcttccgcttcaccatcatggcgcgcgtagtgcatccccatcacgccctgggtgtcggtgaactcgaagaccatgttggtcatcaggtcgcacttggagagcaggcccgcacgagtggcgtggttgacgtcagcgccaatctgaccggcaatccagcccgccagcgcctgaatacggtcggtcttgtcgcgcagcgtgcccagctgttgctggaacagcacggtttgtagacgcggcagatggtcttccagacgttttttacggtcggtattgaagaagaattcagcatctgccagacgcggacgcaccactttctcgttaccggagataatctgggtcggatctttcgactcgatgttggcgacgaagataaagttcggcagcagcttgcccgcgttgtcataaaccgggaaatacttctggtcgcccttcatggtgtacaccagcgcttcggcaggcacggcgaggaatttctcttcgaatttcgccgtcaataccaccggccattccaccagcgaagctacttcttccagcaggctttcgctcaggtcggcattaccgccaatcttacgtgctgcttcttcagcgtccgctttgattttggctttacgcgcttcgtagtcggcaatgactttaccgcgctccagcagaatttgcgggtactggtcagcattgtcgatagtgaactccggctcacccataaagcggtggccgcgaatgacgcggtcagactgaatacccagaatagtcgccggaatgaccttatcgcccaacagcagggtcacggtgtgcaccggacgcacgaagtgtacgtcagacgcgccccagcgcatcagtttcgggatcggtagtttcgccagcgaggtggctaccatgttcggtaccagcgcttcggtactttcgcccttcacgtgggcacgatacagcagccattcgcctttgtcggtcttcagacgctcggcctgatcaacggtgatcccgcagccgcgcgcccagccttctgccgctttgctcggtttgccttcggcgtcaaacgcctgagcaatcgccggaccacgtttttcgacttcgcgatcgggctgagattcagcaagattcgccactttcagcgccagacggcgcggggcggcaaaccattcaacgttaccgtgcgcgaggccggcgttatccagctccgcagtgaagttcgcagcaaaggactcagccaaactgcgcagtgcttttggtggcagctcttcagtgccgatttccaccagaaaagttttctcagacatggccgcctcttacttgtctttgttgcacatcgggaagccgagggcttcacgggaagcataataagcctctgccactgctttggtcagggtgcgaatacgcaaaatgtagcgctgacgttcggtgacggagatagctttacgcgcatccagcaggttgaagctatgggcggctttcagaatacgctcgtaggccggcagcggcagcgggttttccagcgccagcagctgctgggcttctttttcatactgctcgaagcaggtgaataagaaatccacatcggcgtattcaaagttataggtggactgctccacttcgttttgatggaacacgtcgccgtaggtggttttacccagcgggccatcgctccagaccaggtcgtaaacgctgtccacgccctggatatacatcgccagacgttccagaccgtaggtgatttcaccggtcaccggcttgcactccaggccgccgacctgctggaagtaggtgaactgcgtcacttccatgccattcagccacacttcccagccgagtccccaggcgcccagcgtcgggttctcccagttatcttccacgaaacggatatcgtgaatggtcgggtccatacccagctctttcagagaaccgagatacagctcctgaatgttgtccggagacggcttaatcactacctggaactgatagtagtgctgtaagcggttcgggttttcgccgtagcggccatcggtcggacgacgagaaggctgcacataggcagtcgccatcggctctggccccagcgcgcgcaggcaggtcattggatgagaagttcccgcgccgacttccatgtccaatggttgaacaatggtgcagccctggcgagcccagtaatcctgtaaggtcaggatcaagccctggaaggtcctggtatcaaacttttgcatattatttcgtgctggatacgtgtggatttaaaggaaggagccagtatacccgctggatgcgagatatacagtatgaaaccggtttgtttagcgaaaattgccggatttcgcggcatcacacctcaccaggcgcggcttttaccgcatagaaagatgtaaaaactgcccatctgcatcaaaagagcagacaaaactctctttacggaaagtattaccacgcatctcatagctcccctgaaactgttcgaaaccggtaacagcaattttctgtgcgccagtattgtaacgctgcgccgcctgagctttacacaatgcttccatatccagcgtgcgtgttgggctcactttactctgctgggctttttgcgtcggtggaggtgtcgctgtgcatcccaccagagcgatggctatcatcacagaacagaaatacttcattatcatttttattaccgtctggtttgctggtcagtcttattattaaggtttgtgggtagcagacacattgtgcgaatctccttacgccatcacaagatgtagcgtagaaagtcggatttttccagtgagccaccgcgctggaactctattgaaacggaagctgaggaactgatgcagcctaaaattaactggattgataacctgcgagggatcgcctgtttaatggtagtgatgatccatactacaacgtggtacatcaccaacgcccacagcgtcagcccgctaaactgggatattgcgaatgtcctgaattcggcttcgcgcgttagcgttcccctgttttttatgatttcaggctatcttttttttggcgagcgctgcgcgcaaccgcggcattttttacgtatcgccctgtgccttatcttttacagcgttgtcgccctggcttacatttcactttttacttcgatcaacgtcgagctttcgctaaaaaatgtgctgcaaaaacccgtgttttaccacctgtggtttttctttgcgattacggtgatctacctggtatcgccattaatccaggtaaaaaacgtgagcggcaaaatgctcctgatgctgatggtgatcattggtattattgctaacccaaatactgtgccgcaaaaaatcggcggcgttgaatggttgcccatcaatctgtatatcagcggcgacacgttctactacattctctacggtatcctgggccgcgccattggaatgatggagacgcaaaagtcatcgctgacgcttatctgcactgccctgttcatcatcgcggtatttgttatttctcgcggcacattgcatgaattacgctggcgcggaaattttgccgatacctggtatctgtattgcggtcccatggtgtttatttgcgccgtctcactgttcacggtagttaaaaataagctgaatgcgcggacgttacctggactggggcttatctcccgccactcgttgggcatttatggtttccacgcactgattatccatgcgctacgtactaatggtctggagttaaaacgttggccgccgttagacatcgtgtgggtttttgccgcgacggtgacaggaagcctgctactttccatgctgttacagcgtattgataaacggaaatgggttagctaaacgacaatgatggctccggccatcattcatcatcactgtaggaagcgtaaagatcggttccatatatactgacccccagcgccaccagacacagtattttcagcgcgcccgccagcgccaggttaaatacgccgaccgcgaccatgccgatgccaagcaacagcaaagatttgcaacgagaaagcaagcggccatttcccgtgtgttcctggcgaattaagactggaaaaccacacatgacgattgccgcaaaaaaatatcccttttcgcttaatgtatgacagcctggccacagtcccaccaggtataccactgcaccgacaactaacattcccaggccgaatatccgtttcctgcgcgcaacgtgatcgtccatctcactctccttgtggttgtgtgagacacattaagcgaagaaatagcgatgaaaaaggcgcctgctcagcaataatataaaaatcagaaaacacacatacttacttcgatataattcaatagaattaatatttacgggaaatgcctttcagccaaaactgaaaggcattctgacttatgacatcaacggcaacagctgctgataaagtcgacggaaggtttcacgacgttgttgataaaccgcatgacgctgcgcatcaggataatgcgcctgctccagcggcaactgcggcaatacatcggcgagcggggtctgtttattcaccgcaatttgcgccagacgcgccgcgcccagcgctggccctacatcgccgccagtacgataatcaagctgtagcccgctaatatcagatagcatctgacgccagtattcgctgcgcgccccgccgccgataagcgtcacgctggcgggtttgacgccgcaggcgtgaaccacatccataccgtccgccaaagcatatcccacgccctccagtaccgcccgcgccagttccgccgggccatgctgatgggttaaaccaaagaaaacgccttttgcctgcggattattatgcggcgtgcgctcgccggacaggtacggcaaaaaccagatcgaatcggcatgctcatccgcctgctgtgcggcggcaatcagcgccgggacgttctcctgcccggtgagtttagccgcccagtccagacaagaggcggcgctcaacatcacagacattaaatgccagcgttccggcagcgcatggcaaaaactgtgtactgcgctctccggtttactcagaaagccgtcgctgacggcaaaatagacgcccgatgttccgagtgagagcatcgcctgtccggcatcgatcattcctacgccgaccgcgccagccgcattgtcgccgccgcccgccaccacaggtactgctggcattccccatgcgctggccacctccggcagcaacgttccggtaatgtcactaccttcaaataacgctggcatctgctgtcgggttaaatgacaggcgttgagcataacgtcgctccagtcgcgctttttcacgtccagccacatcgttcccgccgcatccgacatatcgctggcaaagacgcctgtcattcgcagccgcagaaaatctttcggcagcagaaccttgtctatctggtagaaaatatccggttcgtggcgctgcacccagactaatttgggcgcggtaaaaccgggcatcatcagattaccggttatcgcacgcgactgcggcacctgtttttccagccaggcgcactcttcgctacagcgtccgtcattccataaaatcgctggtcgcagaacctgctgacggctatcaagcaatgtcgcgccatgcatttgtccggcgatgcccaacgcccggacgccacttaacgactgttgccgacctaaacctttaaccgcacgatccgtcgcctgccaccactgctctggttcctgttccgaccataagggatgcggacgcgatacggtcagtttttcagtatgcgtagccagcacatcgccctgctcattcaacaggatagcttttacacccgatgtaccaagatcgatcccgatatacatagtgtgggttcctttactgaaagcgcccggcagcgctacgcttaccgggctaatcacgactacaggccgggctaacgcggagtcgcccggtagatagggttatttatcaaacagataacggttaaccagattttctaacagctcctgatgaccgctttgatgtactggcgccagattatgctgctccgcatactgcgccagttcgcctaaggagagttgtcctttcagaatctgctgacccagctcgccattccagccggcatagcgcttcgccacgcgtttatccagctcgccgtcttcaaccatacgcgcggcgattttcagcgacaacgccatcgtatccatcgcgccgatatgaccgtagaacagatcgtatttatcggtgctctggcgacgaactttggcgtcgaagttgagaccgcccgtcgtgaatccgcccgctttcaggatttcgtacatcaccagcgcgttctcttcaacgctaatcgggaactgatcggtatcccagcccagttgcgcatcgccgcggttggcgtcaacggagccaaaaatacccagcgcgatagcggttgcgatttcatggtggaacgaatggcccgccagcgtcgcgtggttcgcctcaatgttcactttgatctctttttccaggccgaactgtttgaggaagccatagaccgttgcaacgtcataatcatactgatgttttgtcggttcctgcggtttcggttcaatcagcagtgtgccctggaaacccattttatgtttgtgctcgaccaccatttgcataaagcggccaatctgttcgcgttcctggcgcagatcggtattcagcaacgtttcataaccttcgcgcccgccccacaggacgtaattttcgccgcccagtttatgcgtggcgttcattgccgtaaccacttgcgtcgctgcccagctaaagacttccggatccgggttagtggcggcgcctgcgccatagcgcgggttggtaaagcagttcgccgttccccacagcagttttacgccgctctgctcctgtttcgccgccagcacatccaccatctgcgcgaagttgtttttatattctttcaacgacgcgccttccggcgacacatccacgtcatggaagcagtaaaaaggcacattcagtttgtggaaaaattcaaacgccacatccgctttgcgtttcgccagctccagcgcttcgcccggttgctgccacggacgattaaacgcgcctacaccaaacatatccgcgccgttccagcagaaggtatgccagtaacaggccgcgaaacgcaggtgatcttccatacgtttacctaaaaccagctcgtcgggattgtaatgacgaaatgccagcgggttagtcgattgagggccttcatagcgaacacgatcgagttggtcaaaataagcctgcatagtgagctccataatcagataagacggcaagtaaacgacataacgtcatactggaatttcctgatttattgctcaattacgttatttcacaccgctattaagagaatccccaaatgtgctctggctctcaaaaaaacgctgaaaaccacagaagaaaaaagcgatcgcgatcgaatcctggcaaataaacaaaaaaccgtaatatatagataagaaatgacaattgtcatccgccgtttgctgtgatgaatttcgcataacgtttcaggcgcaaaataatttgtcatcattcgccagaccgttatgtcagccgttttgatagtatccatgagtccaggttcacttttgcaggatatatcctcatgtttgataaacgtcaccgtatcactctgttatttaacgcgaataaagcctatgaccgtcaggtagtggagggggtgggtgaatatttacaagcctcgcaatccgaatgggatatatttattgaggaagatttccgtgcccgtatcgataacattaaagagtggttaggcgacggcgttattgccgattacgatgatgacgatatcgcgcaattattggccgatgtcgacgtacccattgtcggggtcggcggttcttaccatcttgctgaaaattatcctgccgttcattacatcgccaccgataatcatgcgctcgttgaaagcgctttcctgcatttaaaagaaaaaggcgttaaccgcttcgtgttttacggtttgcccgactccagccgcaaacattgggcggcggaacgggaatacgcctttcgccagctggtcgccgaggaaaaataccgcggcgtagtctatcaggggctggaaaccgcgccggaaaactggcagcacgcgcaaaatcgcctcgccgactggcttcagacgctgccgccgcaaaccggcatcattgccgtaacggatgcccgcgcccgtcacgtattgcaggcctgcgaacacctgcatattccggtgccggaaaaactttgcgttatcggtattgataacgaagagttaacccgttacctgtcgcgcgtcgcgctttcctccgtcgcgcagggggcgcggcaaatgggctatcaggcggcgaagctgctgcaccgtttgctggcgcgtgaagagatgcctttacagcgcattctggtgccgccggtgcgcgtcattgcgcgccgctcgacagactatcgctccctgaccgatccggcggttatccaggcgatgcactttattcgtaaccatgcctgtaagggcattaaagtcgagcaggtgctggacgcggttgggatttcacgttcaaacctggaaaaacgttttaaggaagaagttggcgagacgatacatgcgctgatccacgccgaaaagctggaaaaagcgcgtagtttgttgatttctaccacgttggcgataaacgaaatttcgcaaatgtgcggctacccgtcgctgcaatatttctattcggtgtttaaaaaggagtacgtcactacgccgaaggagtatcgcgaccagcatagtgaagcgttgttgtagtttatccagcctacagatgccttgtaagccggatagcgtagcgccatccggcacacagaattacatatgcgcggcgatcagacgctggttgtcctggtacatcgcgaacaagtagttgttatagcgcgacccctgggtagagtaacccttcagcttatgaatcatcgccgtggcggtgacttcctgatccgccttacgcagttgggcgcgcgacttgcggaaagaagaataagccggatgcgtgttcaggttggcgacatacgcgctcaccgactcctcaaccgacgcgaattgcgagtaacctttcaccttacccggcgtattggtacaacgccctttcgtgcacttcatgccgaacaggttattgttgctacgcgccagtttagaggttccccagccgctttccgccgccgccatcgtcgccaccatgctggttgggataatgtcgacgcgctccagcaacgtattccacggaatacgacgcgtgttgccggaccagctcactttatagcgcttcgcgatatctttcatacgcgcgcgttcagacggcgaccagcggttctggtactgttttgagatcagccaattacggtccgcggtaatcgcggcattttggctggtgatgtaaggcataacggtccggagaaacgctttttttctgggggttccggaagggtattttcgcaaatcaggaagtgaactgctctttgcactattgcgagaatactcttgtttactgctaacctgtttataacttgtctcagttatgtgggacttttgactcgtttgtgttgcgtgcgtctttgccagcacctcacccgaaaatgcgatggtgagtaacataagaatcattgccccatatcgtcgcatgggagtcaatatcattaggtctcctggtcggattgatacattccaacaccttttatttttcacgaagttgaggtttgaaccccaaattctagcaaaaataggcttaaaaagcacctcagggaatagtcttaatccgaaactatgtcaagtattaacgataacaggcagcaataatgccaataaaatgtggtgcttatcgcaaatagaggcgtttttttgcgcctcgtcgctcaccctcgcgtctcctcctgcgcgactctctgctgaggaggagttcattcgcctaaaaaccaggcaagctgatgaatattgcccacaaaggatagcgtgatgaaacttgccgccttcgctctgacgctgatacccggtatcgcgatcgcctcatcatggacctcacccggttttccgacgttctcgacgcaggaaaccgggcgctttaccagccatgctgcattaacaaaaggtacacgcgcgttaacgctccatattgaccagcagtgctggcagccctccggcgccataaaactcaaccaaatgttgtcgttaaaaccctgcgaaggcgcgccgccgcaatggcgtttgtttaaagatggcgactatacgataacggtagatacccgctccggtacgccgaccctgttgttatcgataaaaactgaacctgaacgcaccgcgcagctcgcctaccagtgtcccgtctgggatgggtcgccgctcacgctggatgttcgccaaacctttccggaagggacggtagtgcgcgattattacagtggtcaaaccgataccgtccaaaacgggcaaatcacgctgcaacctgccgacagccacgggcttttattgctggaacgcgcggaaacccatgcgccggcgccttttaactggcgcaacgccaccgtttattttgtgcttacggatcgctttcgcaatggcgatccaaccaacgaccacagctatagtcgccataaggatggtatgcaagagattggcactttccacggcggcgatttgcgcgggttgacgagtcaactggactatctacagcaattaggcgtgaacgccttgtggataagctcgccgtttgaacagatccacggctgggtcggcggcgggacaaaaggcgattttcctcattacgcctatcacggctattacactcaggactggacgacgctggatgccaatatgggcagcgaagccgatctccgcgcgctggtcgacggcgcgcaccagcgcggcatccgtattttatttgacgtagtaatgaatcatgccggttacgccacgctggcggatatgcaggagtatcagttcggcgcgctctatttatccggcgcggaacggcaaaaaattctcggcgatcgctggacaaactggcgacccgccgccggacaaagctggcacagctttaacgactacatcaacttcagcgacagcgccgcctgggaaaaatggtgggggaaaaagtggattcgtaccgatattggcgactacgacagtccgggatttgacgatttaaccctgtcgctggccttcctgccggatataaaaacggaatctaccacgccttccggtctacccgcgttctatgccaacaaacccgatactaaagcaaagttcattgagggctatacgccacgggattatctgactcactggttaagccagtgggtacatgattacggcattgacgggttccgggtcgatactgccaaaaacgttgagcttcctgcctggcaacagctaaaaacccaggccagcgcggcgttacgtgaatggaagcaggccaatccggacaaagcgctggataatagcccgttctggatgactggcgaagcgtggggccacggcgtcatgaaaagtgattattatcgctatggtttcgacgcgatgatcaattttgattatcaggagcaggcggcgaaagcggtcgattgcctggcggaaatggggccagtctggcagcagatgacggataaaatgcaggatttcaacgtattaagttacctctcctcgcatgatacgcgccttttccgtgagggcggtgataaggcggcggaactgctgctgctttcgccaggcgcggtgcagatcttttacggcgatgaatccgctcgtcccttcggccccaccggctccgacccgctgcaaggcacccgttcagatatgaactggcaggacgtgagcggaaagtcagccgcagccgtcgcgcactggcagcgtattagccagttccgcgccagacatcccgccatcggcgcaggccaacaaaccacgctgacgctaaaacacgggtacggttttgtacgccagtacggcgacgatacggtgatggtcgtctgggcgggccgccgctaatcgtggcgctaccggtctcctcgcgtaccggtagccccttcaaaacaaaaaactaacctgataaaaatttgtagcataaaacatcaacaccaccgcctgacccccatttgcgccccgccatttgtagcgttatggttatccactttgacagacagttcgatagatcacccgttatgacattttcacttttcggcgataaatttacccgccattcaggcattacccgcctgatggaggatctcaacgacggcttacgcacgccaggcgccatcatgcttggcggcggtaacccggcacacatccctgcaatgcaggattatttccagacgctactgacagatatggtagaaagcggcaaagccgctgatgcgctttgtaattatgacggtccccagggaaaaacggcgctactgaatgcactggccgtactgctacgtgaaacgctgggatgggatatcgaaccacagaatattgcgctgacaaatggcagtcagagcgcgtttttctacttatttaatctcttcgccggacgtcgcgccgacggcagtacgaaaaaggtactattcccgcttgcgccggaatacatcggctatgcagattccggtctggaagacgacctcttcgtttcggcgcggccgaatattgaactgctgccggaaggccagtttaagtatcacgtcgattttgagcatctgcacatcggcgaagaaacggggatgatttgcgtctcgcgcccaaccaacccaaccggtaacgttatcaccgacgaagagctgatgaagctggacagactggcgaatcagcacaacatcccactggtgattgataacgcttacggtgtaccgtttccgggcattatctttagcgaggcgcgcccgctgtggaaccccaatattatcctatgcatgagcctctcgaagctggggctgcccggttcccgctgcgggattatcatcgccaatgataagacgattaccgccattgccaacatgaacggcatcatcagccttgcgcccgggggcatgggcccggcgatgatgtgcgaaatgattaagcgtaacgatctgctgcggctgtcggaaacggttatcaaacctttctactatcagcgcgttcaacagacgatcgcgatcattcgtcgctatttatccgaagaacgctgcctgattcataaaccagaaggcgcaatatttttgtggctgtggtttaaagatctgccgattaccaccgagttactctatcaacgcttgaaagcgcgcggcgtgctgatggtgccgggccactatttctttcccggactggataaaccctggccgcacacacaccagtgtatgcggatgaactacgtgcctgaaccggacaaaatcgaggcgggcgtaaaaattctggcagaagagatagaacgcgcctggcgtgaaggctgacggttattccggccatcatgcaggccggaacgacgttcagaaaggttgagaatagaggcgctggcgctgcacgtgtgctgcgtcaacgcactgtaacgcactggtcgggcaggcttccacgcacgccggccccgcttcccgatgccagcaaagatcgcatttaatcgcctgcgcgcctgacgcggacgccaccacagtcatcgcgccaaacgggcaagccagcatacagcttttacaaccaatgcagcgcgatgacgtcacgaagatatgcccccgatcacggcgaatcgcctgtaccgggcagacatttgcgcacggcgcgtcctcacactgatggcagaccgtggccgtggtgaagctatcctcttttatcacccggatacgcggcacaaagtccgccgtcgtcaccgccgcgctattctgctgttcctggtgcgacaccacgcaggcgacctcgcaggtacgacacccgatacacgccgacgcatccgccataataaaccggttcattgttctccccctgcgttaaaacgccagaatgccagagagccattccccgccgctttgatcccactacgcaaacggacaaattttgtcagatgcctgataaaacctggcgagctgtcttattcgcgaacggtaaatcccagctcgttagagatagcctgtgcggtttcacgcaacggtttgagcagatttttctcgccgatctgttttagccgtgacgtcgacagtgaaatagaaatggcgtaaggcactcgatggtgaatatcaaacacaggcacagcaatacaggaaacgcctagttcattttcttcgcgatccatcgccatgctggtttcacgaatttgcgccagctcatcgtacattgctggtaaatcggtaatggtattacgagtcagcggctggatctgatctttatggctttcccagtaagacgccacataatccggctgaccaaacgccatataaattttccccatcgccgagcagtacagcggcatatgctggccaatgtaggcacgcgtgcgcagcataccggtggtcggttccagcttataaatcaggatagcgtggtcatcttcacggctggaaaaattcaccgtctcgccggtggtcaggttgagcgcctcaaggtgcggtgccgcaacgtggatgatattcagcgatgacagggctttttggccgacggcaataaactttgtcgtcagacggtagctcccggccgccggcgctggcgtcacatatccgcaggattgaagcccctgcaacaaacgatggacggtactcttgttcagccccgccagctccgacaggtgcgccagcgggcaaccgttcgggtagttactcaaaatttctatcaacatcaggccacgaaacaggctctgactccccgcaggcttctctttatcgttgttctggctcatcagaaaactctctcctttcttgggcgatcagatggtagctcaaagtgtgttgcagttcacgatatcagcataaaaaacataacccgatgattttaatcatttttaaaaaccttctctggcgttgccatgtcaatttttgatctatatatttggaactagatttcgcattatgaaatttatagacaaaaaaacatactaaaatttctaacaatcgaccaggagaacagggatgaaagtaactttcgaagagttaaaaggggccttctaccgcgtcttgcggtcgcggaatattgcggaagataccgccgacgagtgcgcggaaatgttcgctcgcaccaccgagtccggtgtctattcccacggcgtgaaccgctttcctcgcttcatccagcaactggataacggcgacattattcctgatgctaaaccgcagcgggttaccagcctcggcgccatcgaacagtgggatgctcagcgcgctatcggcaacctgacggcgaaaaagatgatggaccgggccatcgagctggcttccgatcatggtattggcctggtggcgttacgtaatgctaaccactggatgcgcggcggcagctacggctggcaggcggcggaaaaaggctatatcggcatttgctggaccaactccatcgccgtcatgccgccgtggggggcgaaagagtgccgtatcggtaccaatccgctgatcgtcgccatcccgtctacgccgatcacgatggtagatatgtcgatgtcgatgttctcctacggaatgttagaagttaaccgtctggcgggccgcgaactgccggtggacggcggtttcgacgataacggtcagttgaccaaagaaccgggcgttatcgagaaaaatcgccgcattttaccgatgggttactggaaaggatctggtctgtcgattgtgctggacatgattgccaccctgctttccaacggctcttccgttgccgaagtgacccaggaaaacagcgatgaatatggcgtctcgcagattttcatcgccatagaagtggataagctgatcgatggcgcaacccgcgacgccaaactgcagcggattatggatttcatcaccaccgctgaacgcgccgacgacaacgtcgcgattcggctgcccggccacgaatttaccaaactgctggatgacaaccgccgtcacggtatcaccattgacgacagcgtctgggctaaaattcaggcgctgtaaggagccacatcatgatttttggacatatcgcgcagcctgatccgtgccggttaccgtcggccatagagcaggcgctcgatttcctgcgtaatacggactttcgcacgctggaacctggcgtagtggaaatcgacggcaaaaatatcttcgcgcagattatcgatatgaccacccgcgatgctgctgaaaatcgtccggaagtccatcgccgctatctggatattcagtttctggcatggggtgaagagaaaattggggttgccattgataccggtaataatcaaatcagcgagtcattattagaacagcgcgatattattttttatcacgacagtgaacatgaatcattcattgaaatgataccgggaagttatgccctgtttttcccgcaggatgttcatcgtccaggttgtaataaaagcattgctacgccgatacggaaaatagtcgtaaaagtcgccatagacgttttataaaatagagtttactggagcacaaaatgaaaaataataccggttatattatcggtgcgtacccttgtgcaccctcatttcaccagaagagtgaagaggaagagacggaattctggcggcaactctctgatactccggatatccgggggctggagcagccttgtcttgaacatcttcacccgctcggcgacgagtggttattgcgccatacaccagggaactggcaaatcgtggtcaccgcgataatggaaaccatgcgccgccgtagcgaaaacggcggttttggattagcgtccagtgacgaggaacagcgtaaagcctgcgtggaatactaccgtcatctttatcagaagatcaataaaatcaatgggaacaataccggcaaagtcatagcccttgagcttcatgccgccccgctggcgggcaatccgaacgtggcgcaggcaaccgacgcctttgcgcgctcattaaaagagattgccaactgggactggtcctgcgacctggtgcttgaacactgcgacgcgatgaccggccccgcaccgcgcaaaggattcttaccgttggtaaacgtactggaaactattgccgactatgacataagcgtctgcattaactgggcgcgctcggctattgaagggcgggatacctctctaccgctgatccacacgcagcaggccaaacaggctggaaaactcggggcactgatgttctccggtacaacgctggatggagaatacggcgaatggcaggacctccatgctccgtttgcacctttctgtccacaaagtctgatgacggagaaacatgttaaagaactgattaccgccgccgctcccgaactgttgcagtttaccggtattaaattgttggaaatcaatgccagtgccgatattaatcaccgcataaatatattacgcgatggtattaacatgatgaaaaaggccacacgccgctaacctgaattaaacatcatcaccttaattctcggcctgcaactcaacgttgcgccgacctaatataaaccaaacataagaaattaagttccactattcagcatcgaaagaaataagtttctataacctgatggagtcgttatgaagcgggtacttgagggcatacttgcggtattaattgccgtactttcctgcattgtatttattaacgttattttacgttacggttttgagagcagtattttgtcggtagatgaactatcacgttatctatttgtatggctgacgtttattggcgccatcgttgcatttatggataacgctcacgttcaggtcacttttgtggtggaaaaactttcgccagcgaatcagcgtcgtctctcgctgctgacgcattcgctgattttattgttatgcatcgcattaggctggggcagcctgcaaaaagcgttgcaggactggagcgatcactcgccaatcctcggtttaccgatcggcctgatgtatatcgcctgtctgcccacaagcgttgccatcgcgttaatcgagctgcgtcggctttatcacttaataacgcgtaacgattcctttcaacaaccacagcaaggagcctaatcatggccgtggtgatatttctctgctgcctgctcggcgggatcgcgataggtttacccatcgcctggtcgctgctgctttgcggcgctgctctgatggcatacctggatatgtttgacgtgcagattatggcgcaaaccctggttaacggcgcggacagtttctccctactggccattcccttttttgttttggccggtgaaatcatgaacgcgggcggcctgtcaaagcgaattgtcgacctgccgatgaagctggtcggccataagcccggcggcctgggctacgtgggcgttattgcggcaatgattatggccagcctttccggctctgcggtagcagataccgctgcggtcgccgcgctgctggtgccgatgatgcgctccgcaaactacccgatcaaccgctccgttgggttaatcgcttccggcgggatcattgcgccaattattcccccctcgattccttttattatcttcggcgtttccagcggcttgtcgatcagcaagctgtttatggccgggatcgcaccgggcatcatgatgggcgcggcgcttatgctcacctggtggtggcaggccgggcgattaaatctcccttctcagcctaaagcaacaccgcgtgaaatctggcaatcattggtttcaggtatctgggcgctgtttttaccggtgattatcatcggcggcttccgttccggacttttcacgccaacggaggcaggggcggtcgccgcgttttacgccctctttgtcgccgtggttatctatcgggaattaacgttttccagtctctaccacgtgctggtcaatgccgccaaaacgacgtcagtcgtcatgtttctggtggctgcggcccaggtatccgcctggctgattacgatcgcggaattacccatgatggtgtcagatttgctgcagccgctggtcgactctccgcgactcttatttatcgtcattatgatctcaattatggtcgtcggtatggtgatggatttgacgccaacggtgttaattcttacccctgtattattgccattagttaaagaagccaatattgacccgatttatttcggcgtcatgttcattattaactgctctattggattaatcacaccgcccgttggcaacgtcctcaacgttatttccggggtagcaaaattgaaatttgatgacgcggtaagaggcgtattcccttacgttgtcgtcctgatgtcgctgctggttttatttatttttattcccgagctaattatcacaccgcttaaatggattaattaaaggataatattatgaaattacacgttattgctcgttcattattgatagctggtctgacggttttcagcgtgtcgtctctggcggcgcaatctttacgttttggttatgaaacaccgcaaactgactcccaacatattgccgcgaaaaaatttaacgaactattaaaagaaaaaactaacggcgaattaacgctaaaactctttcctgacagcacattaggtaacgcccaggcaatgatcagcggggtgcgcggcggaaccattgatatggaaatgtccggttcgaacaatttcaccggcctggcccctgtattcaacttacttgatgtccccttcctgtttcgcgataccgcgcatgcgcataaaacgctcgacggcaaagtcggcgatgaactgaaaaaatcactcgattcaaaagggttaaaagtgctggcctactgggaaaacggctggcgcgacgtcaccaactcccgcgcgccggtaaaaacgccgggcgatttgaaaggcttaaaaatccgcactaacaacagcccaatgaatatcgcggcctttaaaatcttcggcgcgaaccctattccgatgccattctccgaagtctataccggcctcgaaacccgtacgattgatgcccaggaacaccctatcaacgtcgtgtggtcagcgaaattctatgaggtacagaaatacctctccctcactcatcacgcctattcgcctctgctgctggtgatcaataaagccaaattcgacgctttaagcccgcagttccaggaggcactgctgagttccgccaaagaagcgggtgactatcagcgcaaactggtcgccgaagatcagcaaaaaattatcgatggcatgaaagaagccgaagttgaagtcctgaccgatatcgaccgtaaagccttcagcgatgcgctgggcagccaggtgcgcgatatgttcctgaaagacaacccgcagggcgccgatctcctgaaagccgtggacgaggtgcaataagtcatgagcaactactggctggggttagattgtggtgggagttggctaaaagccgggttgtacgatggcgcaggccgggaagtagcggtgcaacgcctgccgctgcacgctttaagcccgcagccaggctgggttgaacgcgatatgaccgagctgtggcaacagtgcgcctcggtcatcagcaaactgctggcgcacacgggggtgagcggctcacaaatccgcggtctgggtatttccgctcagggtaagggcctgttcctgttagataaaagcgatcggccattaggtaaagcgatactctcttccgaccgtcgcgccatggaaattgtccagcgctggcaaaaagaagcggttccgcaaaaactctacccgctgacccggcaaaccctgtggaccgggcatccagtctcccttttacgctgggtaaaagagaatgagccgcagcgctacgcgcagataggctgcgtcatgatgacgcatgactatctgcgctggtgcttaaccggcgtgaaaggctgtgaggagagcaacatctccgagtccaacctctacaacatggcgacgggccagtacgacccgcgtctgaccgagtggctgggcatcagtgaaatcgacagcgcgctgtcccccgtggtgggttcagccgaaatatgcggggagatcaccgctcaggcagccgccatcaccggtctggcggcgggtacccccgtcgtcggcggcctgtttgatgtggtttccaccgccctttgcgccggtattgaggatgaatcgaccctcaatgcggtgatgggcacctgggccgtcaccagcggcatcgctcacggcctgcgcgaccatgaggcccacccttacgtctatggccgctacgtcaatgacgggcagtatatcgttcacgaagccagcccgacctcctccggcaaccttgaatggtttaccgcccagtggggcgacctctcttttgacgagatcaatcaggcggtcgccagcctgccgaaagccggtagcgaccttttttttctgccgtttctctacggcagcaatgccggactggagatgacctgcggtttttacggcatgcaggcgctgcacaaccgcgcgcacctgctacaggcgctctatgaaggcgtggtcttcagccatatgacccacctcaaccgcatgcgtgaacgctttaccgaggtttgcgccctgcgcgttaccggcggcccggcccactccgacgtctggatgcagatgctggcggacgtcagcggtttacgcattgagctgccgcaggtggaggagaccggctgcttcggcgcggcgctggctgcccgcgtcggcaccggcgtatatcgcgatttccgcgaggcccaacgcgacctgcagcacccggtgcgcacgctgctgccggacatgaccgcgcacgccctctaccagcgcaaataccgccaataccaggatttgattgaagcactacagggctatcacgcccgtattaaggagcacgcattatgagccgaccattactgcaactggcgctcgaccacaccagtctggaagcagcccaacgcgatgtcgccctgctacaggatcatgtcgatatcgttgaggccggaaccatcctttgtttaaccgaaggccttagcgcggtgaaagccctgcgagcgcagtgcccggaaaaaatcatcgtcgccgactggaaagtggccgatgccggtgaaaccctggcgcagcaggcttttggcgctggcgctaactggatgactatcatctgcgccgcgccgctcgcgaccgtcgagaaaggccatgccgtcgcgcaatcctgcggcggtgaaattcaaatggagctgttcggcaactggacgctggacgacgcccgagactggtatcgcaccggcgtgcgtcaggcgatttatcatcgcggacgcgatgcgcaggccagcgggcaacagtggggagaagcggacctggcacgcatgaaggcgttgtccgacatcggccttgaactatcgattaccggcggcattaccccagcggatctgccgctgttccgcgacattaacgttaaggcatttatcgccggacgtgcgctggcaggtgccgcccatccggcgcaggtcgccgccgaattccacgcccaaattgacgccatttggggagaaaagcatgcgtaatcatccattaggtatttacgagaaagcactggcgaaagacctcagttggccagagcggctggtgctggcaaaaagctgcggttttgattttgtcgagatgtcggtggatgaaaccgacgaacgcctttctcgcctggagtggacgccagcccaacgcgcatcgctggtgaacgcgatgctggaaagcggcgtcgctatcccgtcaatgtgtctctccgcccatcgccgtttcccttttggcagccgcgacgaagcggtacgccagcgggcgcgtgaaatcatgaccaaagccattcgcctggcgcgcgacctggggatccgcaccatccagttggcaggttacgacgtctattacgaagagcacgacgaaggcacccagcaacgtttcgccgaagggctggcgtgggcggtggaacaggccgcagcggcgcaggtgatgctggcggtggagatcatggataccgcgtttatgaactccatcagcaagtggaaaaagtgggacgagatgctttcgtcaccgtggttcaccgtttatccagacgtcggcaacctcagcgcctgggggaacgacgtgaccgccgagctgaagctgggtattgaccgtatcgccgctatccacctgaaagacacgctgccggtgaccggtgacagccccggccagttccgcgacgtgccgtttggcgaaggatgcgttgattttgtcggcatcttcaaaacgctgcatgagctgaattatcgcggttcatttctgattgagatgtggacagagaaagccagcgagccggtgctggaaattatccaggcccgacgctggattgaatcacggatgcaggaaggaggtttcacatgttagagcaactgaaagccgaggtgctggcggccaacctggccctcccggcgcacgggctggtcacctttacctggggcaacgtcagcgcggtcgatgagacgcgcaaactgatggtcatcaagccttccggcgttgaatatgaggtgatgaccgccgacgatatggtggtggtagagatcgccagcggtaaggtcgttgaaggccataaaaaaccgtcgtccgataccgcgacccatctggcgctctatcgccgctatccgcagatcggtgggatcgtgcatacccattcccgccatgcgacgatctggtcgcaggccgggctcgatctgcccgcctggggcaccacccacgccgactatttctatggcgcgatcccctgtacccggctgatgaccgttgaggaaattaacggcgagtacgagtatcagaccggcgaggtgattattaaaacctttgaagagcgcggtctcgatccggcgcaaatcccggcggtattggttcattcgcacggcccgtttgcctggggtaaaaatgccgccgatgccgtccacaacgccgtggtgcttgaggagtgtgcctatatggggctgttctcgcgccagctggccccgcagctaccggatatgcagcctgaactgctcgataaacactatctgcgtaaacacggcgcgaatgcctattacgggcagtaatgccggcagccacagcctgtgtcagatggcggctgcgccttatccgacctacaagatttgcaatatcaatacgttgtgatgaactcttgtaggcccgataagcaaagcgccatcgggcattcagtttgcaaccgctttgtcagagggccaaagattatactcaagaattaacgtgttccttactgtagcgccgcttccaggcggtaggcgtcaggccggtgtgcttgcggaagatctggcgaaagtaaccaacgtcattaaaaccgcaccgttccgccacctcttttaacgaacgcgcgtcgctaatcagcaacttttccgcctcgcgcacccgctggcggtggatggcttccgttagcgtaaggtgaaatacccgccgataaacgcgtcccagataatccacattgcaatgcagttctttcgccagaaccgcgctggaaagcggcaggtgatagtgcgttcgaatcagctgctgcgctttccaggccagcgacacgccagcggcctcggcgttttcattctgccgggcgtcaacggtgagctgctgcaaaatcagcagcacgatgaactccagcgccgggctgcgctggtgcttttcctgctcgttcataaactggcgaaaaagcgcaatcagcgcctgcggatcggcaacctgggtatgctgcggcacggaaagatgcgtcagccagcgcgggtcgctgtccggcgctttgacctcaaaatggagccagtaaaatttaagatcggcgggaaactcctcaacgccaatatggcggcgatgcggccaaagcaacaggctttccccggcttcgacacagaaaacacattcttcttcctgaattttcaggcagcctttttccacaaatataatttcccacgattgcagacgcctggctggatgacgcccaataccgcgagaaataaataatccgccgttttggactttaatcggtaatgttatggataattcgagcattaatatgtcatttcccgctcattcagcaccgtatttcatattagcttttgattattaactaaaaatagtcatttcactcgatccatctcacatttttaaatgcgggtcggaatcgtcatctttttttactcttttatcgccttgtcgctcaccgctatctgggcaaaatgaatcaggtcataacgcgaaaataaaaattactgccataaaataccccgtcagcgaggaatatctatgacctctacagccttaaggagcacgaaatgaacgtactggaagtcgatctgcataaactgacggtcagcgatccgttcctcggacagtatcaacaactggttcgcgatgtggttattccttaccagtgggatgcgttaaacgatcgtattccagaggctgaacccagccatgccattgaaaatttccgcattgccgcaggccagcagacgggcgacttttacggcatggtctttcaggacagcgacgtggcgaaatggctggaagcggttgcctggtcactgtgccagaagcccgatccagcgcttgagaaaaccgccgatgaggtgattgaactggtggccgccgcgcagtgtgacgatggctatctcaatacgtactttacggcaaaagccccgcaagaacgctggagcaacctggcggagtgccatgagctttattgcgccgggcatctgattgaagcgggcgtcgccttctttcaggccaccggcaagcgtcggctgctagacgtcgtttgtcgcctggccgatcatatcgacagcactttcggccctggcgaaaatcagctgcacggctatccgggccacccggaaattgagctggcgctgatgcgtctgtatgaggtaacagagcagccgcgctatatgacgctggcaagctactttatcgggcagcgcggcgcccaaccgcacttctacgacgaagagtacgaaaaacgcggccaaacctcttactggcatacctacggcccggcgtggatggtcaaagacaaagcctacagccaggcgcatctgccaatttcgcagcagcagacggcaatcggccacgcggtacgttttgtctatctgatgactggcgtggcgcatctcgctcgcctgagcaacgatgaaggcaaacgccaggactgcctgcgtctgtggaaaaatatggcgcagcgtcagctgtatatcaccggaggcatcggttcccagagcagcggcgaagcctttagcagcgattacgatttaccgaatgattcggtctatgcggaaagttgcgcttcaatcggcctgatgatgttcgcccgccggatgctggaaatggaagccgatagccagtacgccgacgtgatggagcgcgcgctgtacaacaccgtcctcggtggtatggcgctggatggcaagcatttcttctacgtcaacccgctggaagtgcatccaaaatcgttaaaattcaaccatatttacgatcacgttaagcccatccgccggcgctggtttggctgcgcctgctgcccgccgaacatcgcccgcgtgctcacctcccttggtcactacatctacacgccgcgtgcggatgcgctgtacatcaatatgtacgtgggtaacagcatggaaataccggttgaaaatggcgcgctcaaactgcgaatcagcgggaactacccgtggcatgagcaggtgaagatcgccatcgactctgtgcagccggtacgtcacacgctggcgctacgtctgccggactggtgccctgaggcaaaagtgacgctcaacgggctggatgtggagcaggatattcgcaaaggttatctgcatatccgtcgaacctggcaggagggcgatacgataaccctgacgctgccgatgccggttcgccgcgtgtatggcaatccgctggcgcgtcacgtcgccggtaaggttgccattcagcgcgggccgctggtctattgccttgagcaggccgataacggcgaagagctgcataatctgtggctaccgaaagagagtgagttccgggtctttgagggcaaagggctttttgcgcataagatgctgattcaggctgaaggcgagaagcaaagcgccccagatgcgcagcatcaggcgttgtggcactacgataacgcgccgtcatcgcgccagccgcagacgctaaccttcattccgtggtttagctgggccaaccgtggcgagggcgaaatgcggatttgggttaacgagcggtaatactgtgccggatggcggctgcgccttatccggcctacaatatttgcaatatcagtatattgcgataaattcttgtaggcccgataagcgaagcgccatcgggcattacctcttgcgtcagaacagccccagaggcttatcggaatagctcaccagcaggcacttggtttgctggtagtgttccagcatcatcttatgcgtttcgcgcccgatgcccgactgcttatagccgccgaacgcagcatgtgccggataggcgtgatagcagttggtccatacgcgcccggcctgaatgccgcgccccatcttataggccagattgccgttgcggctccagacgccggcgccgaggccatactgcgtatcgttagcgatttccagcgcctcctccatggttttaaaggtggttaccgccagcactgggccaaagatctcctcctgaaagacgcgcatattgttcttaccaaacagaatggtaggctcaaggtaatagccctctttaagttcgccatccagctccttgcgtcgcccaccggtcagaatatcggccccctcttttttaccgatatcgatataattgaggatagtctcaagctggccgtgggagacctgcgcccccatctgtgtaccgctatctagcgggttcccgctgcgaatgctctccacccggcgaatagcgcgttccataaagcgctcatagatggactcctggaccagcgcacggcttggacaggtacacacctcgccctggttaaaggcaaacagggcaaatccctccagcgctttatcaaagaacgcatcttcctcatccatcacgtcagcaaagaagatattgggcgatttaccgcctaactccagcgtcaccggaataatgttctgcgtggcgtactgcatgatctgttgacccacttccgtcgaaccggtaaacgccaccttcgcgatacgtttcgaggtcgccagatattcgccaatctcgccgcccgcgccgttcacgacgttgacgacgcccggcggtaacagatcgccaatgatttccatcaacagcaaaacggaaagcggcgtcaggcgtgccggtttaagcaccacgcagttacccgccgccagcgctggcgccattttccagcttgccatcaacaacggaaagttccacgggattatctgccccacgacgccaagcggttcgtgaaaatggtaggccacggtttcgctatcaacttcgctaatcccgccctcctgcgcacgtatacaggaggcgaaatagcggaaatgatcgatcgccagcggtacgtcggcggcgctggtttcacgaatcggtttaccgttatcccaggtttccgctgtcgccaacagttcgaggttttgttccatccgatcggcgatcttaaacaagatagcggcacggtcttgtactgacgtatgcgcccacttatctttcgccttatgcgcggcgtcgagcgctaaatcgatatcttttttaccggaggaagcgacttcacatagcggctggccggtcactggcgtcaggttttgataatattcgccgtcggcgggcgcaacccagtcaccaccaataaaattgtcatagcgggcttttaacttcagtgggtacccgtattcacctggctgaatacgtgttgaagggggattgttcgtcatgaccaactccttattgtaaaggtactccacaagggtagacggtgctggtgaatttttcgccaatgatttcccgctttacgacagcaatcacgaattactttcctttacgtttctccgtctggttttagccatactaaacaggtgcctgtttaacgtacggagaacactatgcagcaatatatcggtattgatgtgggaggaactcacgtcaaatatggcgtgattaacagtgacggcgaagaattaacccatcatcaattcgatacgccagaggacgcctccacgtttacccgcaaatggcaggatgtggtggcgcgttgccaacaggactatgacattgcggcaatcggggtcagtttccctggccatattaatccccataacggtcatgcggcaaaagcgggcgcgctggcttacctggatgacgtcaacctgatggagttgttcagcgggctgaccgatctgccgctggtcgtggagaacgacgcgaactgtgcggcgctgggcgaaatgtggcgaggtgccgggcagcattatgaaaacatggtctgcattaccattggaaccggcattggcggcggtattatcgtcggacgagaactgtatcgcggcgcgcattttcacgccggtgaattcggcgtcatgccggtcgggaacaatggcgaaagtatgcataaaatcgcgtcaaccagcggattaatggcgtcgtgccgccaggcgctggcgctgcctgccgaagagatgccgcctgcggatgtgatcttcgaacgaatggcgaccgatgttcatctgcgtgaggcggtcaatgactgggcgcgttatctttcacgcggcgtttacagcgtgatctctatgtttgatccgggcgtggtgctgatcggcggaggaataagcgaacaggaaaagctctacccgctcctgacgcggcatcttgaaacgtttgaaatgtgggaggcgctccaggtgccgattcagccctgccaactgggaaatcaggcgggcaggctgggcgccgtctggctggcgcagcaaaagctcgaccgaggctaacgtgttacgccttatccggcctgcattgtctacgcaggcccggtaagcgtccgcgccaccgggcaaaggcgttacatcgccgtgcgataaagttccacaatctcatcgtgagtcgcctgaataaggcgcaaagaatacgggtgaaattatcctgataacaggttcacgctggctattttaagaagccagaaaaataaaaagcacatctggttcatttcctgatgtgctttttataaagcaacgcaataattgtattgcttcatttgttatttaatttaaccatttcattctttttgcggaaataataacgcatcacgtaataaatgatcattcccacgacgtcgtgtaaatccaatccggtcaaaatattcaaggatctgaatggccagtttccgccctacattcagcctgtcgcgaaaatccgccgcacaggttgatcctctctcttgatccagctcgcggatcatattggcgaaagcgacaatccgatcgttacgatagtaccgatcttttacgatcgcggtaatgatgccttgctgtgccgcctgccgcagcaccagccgcatcaattgttcttccgttccggtctctttcgccagatcgcgtacccaccagggttcatcgccaaatagcggttcgactttttgccagacggcctgctgctcatcgctaaatcccgctttatgatccggcagatgcaaccaaccgtgatggctatgaatcaggccgtcgtcgcgcatccgctcgatcagcatcagaaccagcgcttcatcctccatcggcagggccatgcggcgtaaacgctcgcgtcccggccccggttcatcgcggtgctgttcgtggtaggtcgccagcgtatcaagaatcttacgctgccagcgggcggcgacgggcgcgcttaacaaattgtctccagcctggataaaaccatgttgctcaataagctgacgcataccgagaggattaagctgacgcgcccaaccgaaatccggcaggttgacggcgccgcgttccagatgaatggccaacgccgcgctatcgtcctgcgcggcggcaagcgttgaaagccagtgcaaataatctggcttacgtttaccgcgacgcggcgccttaagcgtcaccacgcgtgcgccggcaagggtggcacgtgcggaaatatcacgcagcaccagtctgtcattatcggccagccacaacggcgtatcaaagatcagctcggccagcccgccttccagcaaagagacgcgaccggtcacatggctggcagcatggtgaatatgtagcggttgccattgggaaagcggcgcatgaagcgccagagaaacgatcacccgggaaaaagcctcccccaccggcgcatcggaaagcagccagtcgccgcggttaagctgctccttctccgcatcgcccgcaatattgagcgcaatacgttgcccggcatacgcatggtcagtgggctgattttgcgcgtgtagacttcgtacgcgcatcggcgtattaacgccggtcaaccatagcgtatcgcccacgtttacctctccgctcagcgccgttccggtcaccaccagtcccgcccctttcaccgtaaacgcacggtcgatagccaggcggaagcgatgctgcgcggcgtgcgaacgtgcaggaagctgctgtaaatgagcgcgaagttctgcaataccgcgtccttcattggcggcggtgacaaataaaacggtatcggcgaagccatagttgtcgagcgccgccagtacctcttcacgtacttcaccgatacgcgcctcgtccacgcgatcggctttggtcagcgcgacggtgagctggagattacccgtcagttgtaggatctgtaaatgctcgcgcgtttgcgccatgacgccgtcatcacaggcgaccaccagcaaagcgtgatcgataccgcctacgcccgccagcatgttagagaggaatttttcatgcccaggcacatcgataaagcccagcacacgaccatccggctgcggccaataggcgtagcccagatcgatagtcatcccgcgttttttctcttccggcaggcgatcggcattgaccccggtaatcgcctggagcaacgtcgttttaccgtggtctacgtgtccggcagttgcaataatcatttcagcatcatctccataaaccggctttcgtcttcaagacagcgcatatccagccataaacggccatcataaattcggccaatgaccggtacaggcagcatgcgccagcgggccgccagcgcctccagccgactaccgcgcccgtcgtgcggggtaaaggtcatggcggcgctgggaaggcggtctaccggtaatgaaccgctgccgatttgcgacaggcagggtttaacctccagcgcaaattcatcgccgtaacgtgccgccagccgcgcctgtaaccgctgcgcttgttcgcgaatcgacgcttcgctgcgggttaacagacgcagcgtgggtaatttctccgccaacgcttccgggtgcagatacagacgtaacgttgcctccagcgccgccagcgtcattttatccgcacgcagggcgcgtttcagcggatggctttgcagttgggcaatcatcgcttttttgccgacgatgatcccggcctgcggcccgcccagcaacttatcgccggagaagcttaccaggctgacgcctgcggcaatgagctgctgcggcatcggctctttgggtaagccatattgacttaaatccaccagcgaaccgctgcccagatccgccaccaccggaatatccagctctcgcccgatttccgccagttccgcttcctctaccgttttggtaaagccctcaatgctgtaattactggtatgcaccttcatcaacagcccggtattttcatttaccgcctgacggtaatctttcgcgtgcgtccggttggtggtgcctacttcatgcagcgtacagcccgcctggcgcataacatccggaatacgaaacgcgccgccgatttcgaccagctcgccacgcgaaaccaccacctctttgccgctggcggtcgctgccagcatcagcaataccgccgccgcattgttattgacgatacaggcgtcctccgccccggtgatacggcataacagcgtcgccaatgcccggtcgcgatgcccccgcccggcgccatccaaatcgtattccagcgtcaccggcgcgcgcatcgcctgcgttaccgcctcaatcgcttcttgcgcctgcaatgcgcggccaagattggtgtgcaacaccgtccccgtcaggttaatcaccgggcgcagcgcgctttgcgccgcattttccagccggagtttcgcctcttgcgcccagtctgcgtaccagtcgggaagcgtttgcgtattccggatgacgtcgcgcgcgtcgtcaagcatccgcctaagcagatcaaccacctgggtatggccataccgatcgcgcagagaaagaaaggcgctatcgtgcaataaacgatcgatagcaggaagctggctgtagagtgtacgcgtttcgcttgtcatgaaaatgcctggctgttggtggccctctcctggcgggagagggatatcgacataagggggattgtaacgtgagtttgctcaggcggacataatgcgcgtcaagcctttggcgcttcggtgcgggcaaagctttcgcgttgaaaaagcgtttcgaccagtttgaccaggtgggggcggctaacacaccagccaggcgcgacccggcggaagttgagatagcctaccgcacaggcaatcgcgatagtcgccagattgaccgtatccgtttttagcgtcccgtcgctcagataactttcgagcatatccaggctgcggttgattttttcccgctggcgcagcagttccgtttccgattgttgcgccgtcgggcgcgcctgttcgcgtacagacaccaacgctgcatccataatgccgtcagccaacgcttcaagctggcgaactttaagcgctgccatcgggtcacgcgggagcatcgctggcgcgatatccagcagttcaatatattccgcgatgatcggcgaatcgaaccagtactcccctttctccgtcaccagcgctggcaccttacccagagggttgtattgcgccacgccgttatccgcctcgtaaggtagttcattaataaattcgaaggtaatacccttttcgagcagcagaacagagattttgcgcacaaaagggctggtgtagctaccgatgagtttcatgccgtgtcctttttgccaaccagtaaaaatcatagtatggctcaaataagacgaaaagagacacaaaaggaggttgctgaatgacataacgtgagaggactcgcgacaaaatgtttgtcggatcgtattgacgttacccggacttaaaatttcttgtgaagaggatcacaaaaattcaacaaagcaccaaaataaaaatgtgaaatatctcacataaaatggccttttaagggctaaaaattagattcgttgtttttttacacagccactttgtgatcaatatcacatcaattacctctctaccccctatatttatgtgacgcaaatcacataaattgtccctgtctggacagttgaacgattcagtgccagattgcgcagtatctacactacagggtccggctacctctgccgctacattaacaaacctcgggctttcagcctgcgcgacagcaacataagaaggggtgtttttatgtcatccgatattaagatcaaagtgcaaagctttggtcgattcctcagcaatatggtgatgcctaatatcggcgcgtttatcgcgtggggtattatcaccgcattatttattccaacagggtggttgcctaacgaaacgctggcgaaactggttggtccgatgatcacctacctgctgccgctgctcatcggttataccggcggtcgtctggttggcggcgaacgcggcggcgtagtgggcgctatcactaccatgggcgttattgtcggcgcggatatgccgatgttcctcggctcgatgatcgccggtccattaggcggctactgcattaagaaattcgacagttgggtagacggtaagatcaaatccggttttgagatgctggtgaacaacttctccgctggcattatcggtatgatcctcgccatcctggcgttcctcggtattggtccggcggttgaagtcctgtccaaaattctggcggcgggcgttaacttcatggtggcgcacgatatgctgccgctggcgtccatttttgttgaaccggcgaaaatcctgttcctcaataacgcgattaaccacggcatcttctcaccgctgggtatccagcagtcccatgaaatgggtaaatccatcttcttcctgattgaagctaacccgggtccggggatgggcgtcctgctggcgtacatgttcttcggtcgcggcagcgctaaacagtctgcgggcggcgcggccatcatccacttcctgggcggtatccacgaaatttacttcccgtacgtgctgatgaacccacgcctgattctggccgttatccttggcggtatgaccggcgtattcaccctgaccatcctgaacggcggtctggtctctccggcgtctccgggttccattctggcggtactggcgatgacgccaaaaggcgcttacttcgctaacatcgctgccatcgtggcggcaatggcggtctccttcgtggtttctgcaattctgctgaaaaccagcaaagtgaaagaagaagatgacattgaagcggccacccgtcgtatgcatgacatgaaagcggaatctaaaggcgcctctccgctggcggctggcgacgtgaccaacgacctgagccatgtgcgtaaaatcatcgtggcttgcgatgccggtatgggttccagcgcgatgggcgcaggggtactgcgtaagaaagtacaggatgcaggcctgagccagatctccgtcaccaacagcgccattaacaatctgccgccggatgtagatctggtcattactcaccgtgacctgaccgagcgcgcgatgcgtcaggtaccgcaggcgcagcatatttcgctgaccaacttcctggatagcggcctgtacaccagcctgaccgaacgtctggttgccgcacagcgccacaatactaatgaagagaaagtacgcgaccatctgaaagacagctttgaggagggtgataacaacctgttcaagctgggcgcggagaatatcttcctgggccgtaaagccgctaacaaagaagaggcgattcgctttgccggtgaacaactggtgaaaggcggctatgttgagccggaatacgtcgaagcgatgctggaccgcgaaaagctgacgccgacttacctcggtgaatccatcgcagttccgcacggcacggtggaagctaaagatcgcgtgctgaaaaccggcgtggtgttctgccagtatccggaaggcgtacgcttcggtgaagaagaagacgatattgcccgtctggtcattggtatcgccgcacgtaacaatgagcacatccaggtcatcactagcctgaccaacgcgctggatgatgaatccgtgatcgaacgtctggcgcacaccaccagcgtggatgaagtgctggaactgctggcaggtaaaaaagcttaacagttaagcatccccaaaatagttcgagctgcaggaaggcggcaacgcagtgaatccccaggagcgtacataagtacgtgactggggtgagcgaggagagccaacgcatctgcagttcgaaatatgaaggcgatatcctctcccttgtggagagggttaggttgagggaaaagcctcaccccagccctctcgggtaaaaacattaatgaaggttaatactatgaaagcattacattttggcgcaggtaatatcggtcgtggctttatcggcaaattgctggctgacgcggggatacaactgacgtttgcggatgtaaaccaggtcgtactcgatgccctgaatgcccgtcatagctatcaggttcatgttgtgggtgaaaatgagcaggtggataccgtttccggcgtcaacgctgtcagcagcatcggcgatgatgttgtcgacctgattgcccacgttgatttaatcaccactgccgtgggcccggtggtgcttgagcgtatcgctccggctatcgctaaagggctggtaaaacgtaaggcgcagggcgtggatgccccgctgaatatcatcgcctgtgaaaatatggtgcgcggcaccacgcagctgaaaggccacgtaatgaacgcgctggcggatggcgataaagcctgggttgaacagcacgtcggttttgtcgattccgccgttgaccgtattgtgccgccatctgcttctgcgaccaacgatccgctggaagtgacggtagaaacgttcagcgagtggattgtcgataaaacccagtttaaaggcgcgttgccaaacattccggggatggagttaacggataacctgatggcatttgtcgaacgtaaactcttcacgctgaacacaggtcatgctataaccgcgtacctcggcaaattagccggtcatcaaaccattcgcgacgctattctcgatgagagtattcgcgcggtggtgaaaggcgcgatggaagaaagcggcgcggtgctgatcaaacgctacggttttgatgccgacaaacatgcggcatacattcagaaaatcctcggtcgttttgaaaacccgtatctgaaagatgacgtcgaacgcgtaggtcgtcagccgctacgcaaactcagcgcgggcgaccgtctgatcaaaccgctgcttggcaccctggaatatggtctgccgcatgtaaatctggtcaaagggatcgcggcggcgatgcatttccgtagtgatgaagatccgcaggcgcaggagttggcggctctgattaccgaaaaaggcccgcaggccgcgctggcgcaaatttccgggctggatgccaatagcgatgtggtggcggaggcggttaacgcatataacgcgaccaaatgacgcagaatccggcgcaggttagcctgcgcccaaataacagattgtcagatatgcaggcaataatggaacaaacccaggcctttgaaaatcgtgtgcttgagcgtctgaatgctggcaaaaccgtaaggagcttcctgattaccgccgtcgagttattgaccgaggcggtgaatattctggtgcttcaggtgtttcgcaaagacgactatgccgtgaaatacgctgtggaaccgttgctggacggcgacgggccgctgggcgatctttcggtacgtctgaaacttatctatggcctgggcgtactcagccgcaccgaatatgaagatgcggagctgttaatggcgctgcgcgaagagctgaatcacgatggcaatgagtacgcctttaccgacgatgaaatcctcgggccgtttggcgaactgcactgcgtcatggcgctaccgccgccgccgcattttgatacgtccgacgcggcgctatacgccatgcaaattcagcgctaccagcaggcggtgcgttcgacgatggtcctctctctgaccgagctgatttctaaaatcagcttaaaaaaggcctttcaaaagtaaatcccgctgttaacctctttcttcttcttttggtcggtacagccgccggtaatattccagacgctgcaaataaatgggcgcgctctccgacggcacctcggaaggaacataatcacgcggcggcgttttattcaggtattcacggaacgcctggctggacgccataaaatcgacggctttatcaataagaagtggtacgttctcacctatttttgccatgatagatcctccatgtgggacccgcgtctgactcccgcggtcgcttatttgagtttaggatcaatttagcgttgtcattgaggaaaatgtgcttaatcgcttttcttgccgacaaaagggcgcttcatcttttctttcgacaaaaaggattttattctcaacgagataattaaataatgagcagtgtaatacttgccataattgattatctttacgtcatgagttgtgaagaatcactcactgcgcgcatactataaggtatctatcccatttctatcagaagctatcccatgaaagaagttgaaaaaaacgaaattaaacgcctgagcgatcgtcttgacgctattcgccaccagcaggcaggtctctctctggttgaatccgccgataaatacgcggagctggaaaaagaaaaagagacgctagaagcagaaattatccgtctgcgcgaagtacacagccagaaactgagtaaagaagcgcagaagctgatgaacctgccgtttcgccgcgcgatcactaaaaaagagcaggccgacatgggcaagttgaagaaaagcgtgcgtggcctgattgttgtccacccgatgacggcgctgggccgggaaatggggctcaaagagatgacaggtttcgcgaagagcgagttctaaaccttccgcatcccaggctctcaggacacccgttgtacggaggatgtcttgagagcatcgggctatattccgaatttttcatggaactatttacaccgcttatatacaagttcatttttaacggtagtccctgctttttcaggatgaaaaattccactatcatgcctgtttgtatttatacaatgaatttttttcatccccttttcttatatcccgcagaatatgattgacccgcaaaattaaataacattatcatccctgaaaaaaaatcccccatacataaacattataattatatttttataaagcattgctatgagcaattgataaataacgtcgggtttttgcgcgcttctatagaagcgacgaatgttttcattctaaccatacgttaatgagttattggcaatactcgctgaatgatgagctagttgtataaataacaggttaactatttatattatataaattattaacaaggatatttcatatgcacaaaaatggaaaatttatccccctgcttgcgttgggattcacattctttttatctggttgtgattacttcgcagataaacaccttgttgaagaaatgaaagaacaacaaaaagaacaagaaacaaagataaacctgttagaaaaacaacaaaaagaacaagaagcaaagataaatctgttagaaaaacaacaagctacgattatcaacacaaccaaaaaggtcaccgaagtcgttggccgcgttgaacgcaaacaacggctattcgactatacagaactggacccatcacaaacgcactattttattattaacaacggcaatatcggattagccgggcgtattctatctattgagccaatagataatggaagtgttattcatcttgatttagttaacttactcagcattccggtatcaaaccttgcgtttaatatgacatggggtacgaaaaaaccttccgaggcaaaagatctgcctcgctggaaacaactcctgctcaacacgaaaatggactcgacaatcgaactcttaccgggagcatggacaaacgtcacgctaacattaaaaggcgtatcgcccaataatcttaagtatctaaaaataggtattgacatggagaatgtcatattcgacagcatacaacctattaacgatacaaaaaagaagccaaaaaaataatagccattgatacaattattttagaaaaggaaattactcattcatgaatagaatatttaaagtcctctggaatgccgctacgggaacatttgttgtcaccagcgaaaccgcaaaaagccgcggcaaaaaaaacggccgcagaaagctggcagtttccgcactcatcggtcttagcagcattatggtttctgcggatgcactggccaacgcaggaaacgatacaggcgacggcgttactccaacgggtacccagactggaggaaaagggtggattgcaattggtaccgatgccacagccaatacttacaccaacgttgatggcgcaagcgccgcaatgggttataaagcctccgcgatggggaaatggagtaccgccattggttcctacagccagtccaccggcgactcttcgttagcgcttggcgtaaaatcggtttcagccggtgaccgggccattgcaatgggcgcctcatcctcagccagtggaagttattcaatggcaatgggcgtgtatgccaattcgagcggcgcaaaatcggttgcgttaggttataaatctgtcgcgagcggagcaacttcctctgcattaggttatcaagctactgcgagcggcgacgacagcgctgcttttggtaatggcgcaaaagcgataggcaccaactcagttgcccttggctcgggctctgtcgcccaggaagacaattccgtcgccgtgggtaacagcaccactcagcggcagataacctacgttgctaaaggcgacatcaattccaccagtaccgatgccgttacaggtgcgcaaatttattctttaagtcaatccgtcgccgaccgactcggcggaggggcttccgttaatagtgatggtacagtgaatgcgcccctctacgaggtaggcacaggcatctacaataacgtaggtagtgcattaagcgcacttaacacgtctatcactaacacagaggcctctgtcgcaggattagccgaagacgcgctgttgtgggatgaaagcatcagcgcctttagcgctagccacacgggaaacgccagcaaaatcaccaatctggcggcgggtaccctggctgcggacagcaccgatgccgttaacggctctcagttgtttgatacaaatgagaaagtggataagaacactgctgatatcgccaccaataccggcagcatcaaccaaaacactgccgatattaccgctaataccgacagcattaaccagaacacaaccgatatcgccgccaatacgaccagcatcaatcagaacaccactgatatcgccaccaacaccaccaatatcaacagtctgagcgactccgtcaccacgctcaccgatgatgcactgctttgggatgcagcctctggcgcattcagcgctaagcacaacggaagcgacagcaaaatcaccaatctggcggcgggtaccctggccgctgacagcaccgacgccgttaacggctcccagttgtttgatacaaatgagaaagtggatcagaacaccgctgatatcaccaccaataccaacagcatcaatcagaacaccactgatattgccaccaacaccaccaatatcaacaacctgagcgattccatcaccacgctcaccgatgatgccctgttgtgggatgcagcctctggcgcattcagcgctaaccacaacggaagcgccagcaagatcacaaatctggcggcgggcaccctggccgcggacagcaccgatgcggtgaacggctcccagttgtttgccaccaacgaaaatgtgtctcagaacaccgctgatatcaccaccaataccaacagcatcaatcagaacaccactgatattgccaccaacaccaccagtatcaacaacctgagcgattccatcaccacgctcaccgatgatgccctgttatgggatgcagcctctggcacattcagcgccagccgtagcggaagcgccagcaagatcaccaatctggcggcgggcaccctggccgcggacagtacagacgcggtgaacggctcccagttgtatgaaaccaaccagaaggtggatcaaaacacctctgctatcgcagatattaatacgtccatcaccaatcttagctctgacaacctgagctggaatgaaacaacgagttcgttctctgccagccacggaagtagtacgacaaacaaaatcaccaacgttgctgccggagagctgtctgaagaaagtaccgacgcggttaacggatcgcagttgttcgaaaccaatgaaaaagtggatcagaacacgaccgatatcgccgccaataccaccaacatcactcagaacagcaccgcgattgagaacctgaatacttctgtctccgacattaatacgtccattaccggcctcactgataacgctctgttatgggacgaagacaccggcgctttcagcgcaaaccacggtggaagcaccagtaaaataaccaatgtcgccgccggggcgctttctgaggacagtacagacgcggtaaacggatcacagttgtatgaaaccaaccagaaggtggatcaaaacacctctgctatcgcggatatcaatacgtccatcaccaaccttggtaccgatgcactgagctgggatgacgaagagggtgcgttcagcgccagccacggtaccagcggtaccaataagataaccaatgtagcagcaggtgaaatcgccagtgacagtactgacgccgttaatggctctcagctctatgaaactaacatgctgatttctcagtataatgaatctattagccaactagccggcgataccagcgaaacctatatcacggaaaatggtaccggcgtgaaatacatccgtacgaatgataacgggcttgaaggccaggatgcatacgcaacgggtaacggcgcaacggcagtaggttacgacgccgtcgcctctggcgctggcagtctggctcttggccaaaacagcagcagcagcattgagggcagtatcgctttgggcagtggctccacctctaaccgcgctattacaaccggtatacgagaaacgagcgcaacaagcgatggcgtggtgattggctacaatacaacagacagagagttgctgggcgcgttgtcattggggacggatggagaaagctatcgtcaaattaccaacgttgctgacggctctgaagcgcaagatgcggtaacagttcgtcagttacaaaatgccattggtgcggtcactactacaccgaccaagtactaccacgcaaactcaacggaagaagattcactggctgtcggaactgactcactggcaatgggtgcgaagaccatcgtcaatgctgatgcaggtattggtattggtctgaatacactggtgatggctgatgccatcaacgggattgctatcggttctaacgcacgcgccaatcatgcaaacagtattgcaatgggtaatggttctcagaccactcgcggcgcacagactgactacaccgcctacaacatggacacaccgcagaactctgtcggtgagttctctgtcggcagtgaagacggccaacgtcagatcactaacgtcgcggcgggttcggcagataccgatgccgttaacgttggtcaattgaaagtaacggacgcgcaggtttccaggaatacccagagcattactaacctgaatactcaggtatcgaatctggatacccgcgtcaccaatatcgaaaacggcattggcgatatcgtcactaccggtagcaccaagtacttcaagaccaacaccgatggcgcagatgcaaatgcccagggtgcggacagcgtcgcgattggctctggctctattgctgccgctgaaaacagcgtggcgttaggcacaaattccgtcgcagatgaagctaatactgtgtctgtcggctcttctactcaacaacgccgtattaccaacgttgccgcaggggtgaacaacactgacgcggttaatgtggcgcaactgaaagcctcagaagcaggctccgtgcgttatgaaaccaatgcagatggctcggttaactacagtgtgctcaacctgggagacgggagtggcggcaccactcggatcggcaatgtttctgcggcggtgaatgatacggatgcggtgaactatgcgcaattgaaacgcagcgtcgaagaagcaaacacttataccgaccaaaaaatgggtgaaatgaacagcaaaatcaaaggcgtagaaaacaagatgagcggcggtatcgcctcagcgatggcgatggccggtctgccacaagcctacgccccgggcgccaacatgacctcgattgctggcggtacgtttaatggtgaaagtgccgtcgccattggtgtctccatggtaagtgaaagcgggggctgggtgtataaattgcaaggaaccagcaacagccagggcgattactctgcggccattggcgcgggcttccagtggtaatgaagtaacaacactcccgacatcaaaggcaatggcataatgccattgccttttcacttccctttgctgtcctctcccctcaattggccctaccaattttagccagttaccacagcctactcacatttcattaaattaactctacaataccgttgccaataaataacatctggttaactatttgttgtcattatccatacacaacaatattggcaggaccacttttacacataatgtgaccccaacgagatgagcaaagattcatcccattatgcgtgtggttctcaggagacctgcaatgaacctctggcaacaaaactatgacccggcgggtaatatctggctttccagcctgatcgcatcgctcccaatcctgttcttctttttcgccctgattaaactcaagctgaaaggctatgttgccgcttcgtggacggtggttatcgcgctcgccgtcgcgctgctgttctataaaatgccggtcgatcacgcgctggcatcggtcgtgtatggcttcttctacgggctatggccgatagcctggataatcatcgccgcggtctttgtctataaaatttcggtcaagaccgggcagtttgacattattcgctcgtcaattctgtcgattacccccgaccagcgtctgcaaatgctgattgtcggcttctgcttcggcgcgttccttgaaggcgcggcaggtttcggcgcgccggtggcgataaccgccgcgctgctggtgggtctgggctttaatccgctgtatgcggcagggctgtgcctgattgtaaacaccgcgccagtcgcctttggcgcgatggggatcccgattctggttgccggacaggtcacgggcctggacagctttgaaatcggtcagatggtcggtcgtcagctaccgttcctgaccattatcgtcctgttctggattatggcgattatggacggctggcgcggcgtgaaagaaacctggcctgcggtgatggtcgctggcggctcgtttgctatcgcccagtatctcagctccaactttatcgggccggaactgccggacatcatctcttcactggtgtctctggtgtgtctgacgctgttcctcaaacgctggcagccggtacgcatcttccgcttcggcgatatgggcgcgtcgcaggtcgatcagacgctggcccgcacccgctatacgacagggcaaattgttcgcgcctggtcgccgtttctgttcctgaccgccacggtcactctctggagcgtaccgccgtttaaagcgttgtttgcccccggcggcgcgctgtatgactgggtaattaacgttccggtaccgtatctcgataaactggtcgcccgtatgccgccggtcgtacacgaagcgaccgcttacgcggcggtgtataaatttgactggttctccgccaccggcacggcgatcctgtttgccgcgctgttgtctatcgtctggctgaaaatgaaaccctcagccgcaatccagacctttggcagcacgctgaaagagctggcgttgccgatttactccatcggcatggtgctggcgttcgcgtttatctcgaactattccgggctttcttccacgctggcgttagcgctggcgcacaccggcagcgccttcacgttcttctcgccgttcctcggctggctgggggtattcctgaccggctcggatacctcatctaacgcgctgtttgcctctctacaggctaccgcggcgcagcaaatcggcgtctctgatgtgctgatggtggcggcgaataccactggaggcgtaaccgggaagatgatctcgccgcagtctatcgccatcgcctgcgcggcggtggggctggtagggaaagagtccgatctgttccgttttaccgtcaaacacagcctgatcttcacctgtatggtgggcgtgatcactacgcttcaggcctatgttttaacctggatgattccgtgattgtgatgccaaaacgcctgtcagacgagattgcctctcgcgtgcgggcgctgattgaagaacaaaacctggaagcgggcatgaaattgcccgccgagcgccagttggctctacagcttggcgtatcacgcaactctttacgcgaagcgctggcgaagctggtcagtgaaggcgtgctggtgagtcgtcgcggcggcgggacatttgtccgctggcagcacgaaacctggtctgaacagaatatcgtgcaaccgctgaaaatgctgatggcgaacgatccggactacagtttcgacattctggaagcccgccacgccattgaagccagtacggcctggcacgccgccatgcgtgccaccgctgccgacaaagagaaaatcagactctgctttgatgcgacgctcagcgaagacccggatctcgcctcccaggccgacgtgcgctttcatctggcgatcgcggaagcctcgcacaatgtggtgctgttgcaaaccatgcgcggtttcttcgacgtcctgcaatcctccgtcaaacagagtcgccagcgtatgtatctcgttccgcccgtattctcaaagctgacggaacaacaccaggcagtgatggacgccattctggacggtaacgccgagggcgcgcgtaaagcgatgatggcgcacctcagttttgtccacaccacgattaaacgatttgatgaagaccaggcccgccaggcgcgtattacccgcctgcccggcgaccataatgagatgaccagggagaataaatcatgattatttcagcagccagcgattatcgcgccgcagctcagcgcacgttgcctcctttcctcttccactacatcgacggcggcgcgtatgcggaatataccctgcgccgaaatgtggaagacctgtcgcaagtcgctctgcgccagcgcgtgctgaaaaatatgtccgatttaagcctggaaacgaccctgtttaacgaaacgttgtcgatgccggtggcattagcgccggtaggcctgtgcggcatgtacgcccgtcgcggcgaagtacaggccgccgccgccgcagacgcaaagggcattccgttcaccctttccaccgtctccgtctgtccgattgaagaagttgcaccaaccattaagcgcccgatgtggttccagctttatgtactgcgtgaccggggctttatgcgcaacgcgctggaacgtgcaaaagcggcgggctgctccacgctggtctttaccgtggatatgccaacgccgggcgcgcgctaccgtgacgcccactccgggatgagcggcccaaacgcggccatgcgccgttactggcaggcggtgatgcaccctaaatgggcgtgggatgtcggcctgaacggtcgcccgcatgatttaggcaatatttccgcctatctgggtaaaccgaccggccttgaggactatatcggctggctggcaaataacttcgatccgtccatctcctggaaagatctggagtggatacgcgaattctgggacggcccaatggtgatcaaagggatcctcgatccagaagatgcccgcgatgcggtacgtttcggcgctgacggtatcgtggtgtcgaatcacggcggccgccagctcgatggcgtgctctcttccgcccgcgccctgcccgccattgccgatgcggtgaaaggcgatatcgccattctggcggatagcgggatccgtaacgggctggatgtcgtgcgtatgattgcgttgggggccgataccgtactgctgggtcgggcctatctctacgcgctggcgacggcaggaaaagcgggtgtcgccaacctgctggacctgattgagaaagagatgaaggtcgccatgaccctgaccggcgcgaaatccattagcgaaatcagtggcgattcactggtgcaggaactggggaaaagtttgcccgccgcgctggcgccaatgagcaaaggcgatgccgcctgaacgcctggcgcgtgagagcccggtaaatttctgctattctgcccccgcatttaagggggcatcatgcttaacatcgtactcttcgaaccagaaatcccgccgaataccggcaacatcattcgtctttgcgccaataccggctttcgtctgcacatcatcgaaccgatggggtttacctgggatgataagcgcttacgccgcgcagggctggactatcacgaattcgccgcggttcagcgccatcacgattatgccgcctttgtcgccgccgaaaatccgcagcgcctgtttgcgttgacgacaaagggcacgcccgcccatagcgccgtaagctatcaggatggcgattatttgatgtttggcccggaaacgcgcggcctgcccgccagcattctcgatgcgttgcctaaagagcagaagattcgcattccgatgatgccggatagccgtagcatgaacctgtcgaatgcggtgtcggtggtggtgtatgaagcgtggcgccagttaggatatcccggcgcggtattgcggtcgtaatatattcaatgccggatggcggctaacgcctgatccggcctggccgatcccgatggcatgttcccgtttatgcggactctcgcccaatcaaatgaaagccaatatccacaatagcttctgcgcacggtttctgttcaatacgatcggccaacagcgtagcggcgcgctggccaatggcgcgtctgtcaacgcttacggtagtaattgatggtcgattgctggcggcaaaatcaaggtcgccaaaaccaataaccgctaaatcatgcgggatgcgcaaaccacggctttccgcctccatcatcgccccctgtgccagggtatcagaactgcaaacaatgacatcaaacgtcccttcgtcaaaaagctggcttaaaccgctgcgccccagcgaaagcgatgccggaagggggacatctacctgcggtacggcatgaatagcgtggcgttgaagaacactacataacccctgcttacgttgcgcggctcggcgatcggcagtccacaacaagccgggacgacgatagcccttactcagaagatactcccccgtcgcctgcccgactttttcatgggaaaaaccgaccagcatatcaagcggcgtgggcgttaagtcccaaatttccaccaccggaatagccgcgttcaggatgacctttttcagttctatcgtgtgatggatcccggtaagcaccacgccatcggggcggcgggaaagcagtgtcgccaccaactccgcttccgtttgttcggtatatcccgccacgcacagcaatatgtgatatccgcgtcgggccagttcatcgctcagcgactggatggtatcgacaaacatgttgttgttaatttgcggcacgacgacagcgattaatttactccgtcgcgacgccagaccaccggctaacgcgttgggtatgtagcctgtgacgcgaaccgcctgcatgactttctcaaccgttttggggcgaaccagttgtggcgaattcaatgcccggctgactgtcatcggagacagcccggcgctacgtgctacatcttccagcgtcggcgcacgaggtgatttggttctcttcacgtctgatgcccctgcaaagattggctgatttatccgcgcattattcatcatgcctgcggctattgccagcttcgcatcaggaaaggccgtaaatacagtagcttatcaagctcagtcattacaaaatgatagcgccatcattttgtattatgcatttccccagatatttttggatcgtgatccattttgcaataaatcctgctttttatacgacatatgtgatcaaatgttcaaatcaacatcaactttctggatcctgcgttcgcttaataataaaaatgttagcgcaatcattttgtgattatcaggagaaaaaaaatggctttaagcgcgaattccgacgccgtaacgtatgcaaaagcggcgaataccagaaccgcggcagaaaccggcgatcgtatcgaatgggtgaagctatcactggcttttctaccgctggcgacgccagtgagtgacgcgaaggtactgaccgggcgccagaaacctttgaccgaagtggcaatcatcattgccgaaatccgcagtcgcgacggctttgagggcgttggttttagctactccaaacgtgctggcggccagggtatttatgctcacgccaaagagatagccgataatctactgggcgaagatcccaatgatatcgacaaaatatacaccaagctgctgtgggccggagcctcggtggggcgtagcgggatggcggtacaggctatctcccctatcgatatcgccttatgggatatgaaggctaaacgtgccggtctgccactggcaaaactgttgggcgcgcaccgcgactccgttcagtgttacaacacctcaggggggttcttgcatacaccgctcgatcaagtgctgaaaaatgtggtgatttcccgcgaaaatggcattggcggtattaagttgaaagtcggacaacccaactgcgctgaggatattcgccgcttaaccgcagtacgtgaagcgcttggggatgagttcccgttaatggttgacgctaaccagcagtgggatcgcgaaacggctatccgcatggggcgtaaaatggaacagttcaaccttatctggattgaagaaccattagatgcttacgacatcgaaggccatgcccagcttgctgccgcgctggatacgcctatcgccaccggggaaatgctgaccagtttccgggaacacgagcagttgattctgggcaatgccagcgatttcgttcagccagatgcgccgcgtgtcggcggtatctctccgttcctgaagattatggatctggcggcgaaacacgggcgtaagctggcgccgcactttgcgatggaagtacacctgcacctttccgcagcgtatcccctggagccgtggctggaacatttcgagtggctgaacccattattcaacgagcaacttgagctgcgcgatggccgcatgtggatttccgatcgtcatggtctgggtttcacgctcagtgaacaagcgcgccgctggacacaattaacatgtgaatttggcaaacgcccttaacccgactggcgggaatccgtcccgcctctcttaccttacaggatgcattctgcccttatctgaggagtagataatgaacacaataataaagcgcacaaaagtgcgtcataccattcttatatttttatttcttgctaccgtatttaattatgcggatcgcgcaactctatccgtagttgccccaataatgagtaaagaattaggttttgatccggaagcgatgggcctggccttctcctcatttggtattgcctatgtcattatgcaactacccggcggttggctattagaccgctacggttcacgactggtttacggttgcgcattgattggctggtcgttagtaaccatgtttcagggaacgatctatctgtatggcagcccattaattgtactggttattctacgtctgctgatgggcgcgattgaagcgcctgcctttccggcgaacagtcgtttaagcgtacaatggtttcccaataatgaaagaggcttcgttacttcagtttatcaggctgcgcaatatatctcgctgggcattatcaccccgctaatgacgatcattctgcataatttaagctggcattttgtcttctattatattggcgctattggcgtgatgctcggtatattctggttaatgaaagtcaaagatccgatgcaccatccaaaagttaatcaagcggaaattgactatattcgtagcggtggtggcgagccctctctgggctgtaaaaaggagccgcagaaaataacgttcgcgcagattaaaaccgtctgtgttaaccggatgatgatcggtgtttatatcgggcaattctgcgtcacctctatcacctggttcttcctgacctggttcccgacctatctgtaccaggcgaaaggcatgtcgattctgaaagtcggttttgtggccagtattccagccattgccggttttattggcggcctgctcggcggcgtgttctccgactggctactcaaacgcggctatagccttaccgtcgcgcggaaattgcctgttatctgcggtatgttgctctcttgcgtaattgtgatcgccaactacacctcttcagaatttgtggtcattgcggcgatgagtctggccttttttgccaaagggtttggtaacctgggctggtgcgtactcagcgacacctcgccgaaggaagttctgggtattgctggcggcgtatttaacatgtgcggcaatatggcaagcatcgttacgccactggtcatcggcgtgattcttgccaatactcagtcgttcgactttgccattttatacgttggctcgatgggacttattggtctcatttcatatctgtttatcgtcggcccgctggatcgcatcacgctgacatcatccgcagcctgattgtccacattgcgaattcttcgctccgctgttccgggattgcactccatcggaacagcgttttttagttgtaccgcgcaattcagatgccgtcgccatactcaaacgtatggtgtatcccgttgaaatgctggtccatatccatcgacggcttatcgctgcccggcttgccgacaatacgcgccggaacgcctgcggcggtagtgtgcggcgggacaggctgtaaaacgacggaacctgcgccaattttcgcgccgcgccccacctcgatattgccgagaattttcgcgcccgcgccaatcatcacgccttcgcggattttaggatgacgatcgccgctcgttttcccggtaccgcccagggtgacggattgcaagatcgacacatcatcttcaataaccgccgtctcccccaccacaataccggtggcatggtcgagcataatcccgcggccaattttcgctgccgggtgaatatccacctgaaacgagaccgaaacctgattttgcaggaagatagccagcgcgcggcgacctttattccacaaccagtgaccaatgcggtaggcctgtagcgcatgaaagcctttcagatataacagcggcgtggagtatttatccaccgccggatcgcgagtgcgcacggcctgaatatcgcaggctgccgacgcgatcatttccgggtcggcggcataggcttcttcaactacttcacggatagcgatagcgggcatgatgggcgaagccagtttatttgccagcatatagctcagcgcactgcccagattttcatgcttgagtagcgtggcgtgataaaaactggccaacataggctcacagtcagctaaagcgcgggcttcagctttaatattcttccagacgatttccagttcttcacacggcatggcttactccagacgggcagaaaacgaccaacccgttctgtgcgggttgggtcgtttatgcaaacagttccttacggctagtggcgactcagctcttccttgcgggcgcgacctaataacgttaatgctgcctcgcgcgcgttttttccgcaatacaatacttgataaatttcctcggttattggcatttcaacaccaaaacggtgcgccaattcacgaacttctttcgtattgcgatagccttcgaccacctggccaatcttatcctgcgcgcctttaacgtccatgccctggccaagcatcatgccaaaacgacggttgcgcgactggttgtcggtacaggtcagcaccagatcgcctaaacccgccatccccataaaggtggcgggatcggcaccaagcgctgcgccaagccgcgacatttcggtcagtccacgcgtgattagcgccgtgcgggcgttcgcgccgaagccgatgccgtcagacatccccgcgccaatcgcaatcacatttttcaccgcgccgccaagctgcacgccgataaaatccgcattgatatagacgcgaaaactttttccgcagtgcaacagttgctggagatcgtcggcaaaggtctcatcggttgaggccagcgagattgccgtcggcaaacccgccgccagctctttagcgaacgtcggaccggaaatcaccgccagcgggatttgatcgcctaacgcctcgcgagcgacatcctgcaacaggcgccccgtttccgcttccaggcctttggtcgcccataccagacgcgcatccggacgcatcagcggtttaatctgccgcagcacgtcgctgaaaacatggcttggcaccaccaccagaatgttacgactggccgccagcgcggttgctaagtcgctttccaggtgtaacgtatcgggaaaaggcacatcgggaaggaacgcgacgttgcagcgatcgtgctccagggtcgcgatatgttttgggtcgtggccccacaggacaacctggtggccgtttctcgccagagtgatggcaagagcggtgccgtacgagccggcaccgatgactgtcattgacgcattactttggttcatcaggcatcctgatgttcttcagtaccttcgccagcctgctgctgcaaatagttcatgaacagcgcatcaaagttgaccggcgcaaggttcagttgcgggaacgtaccgcgtgaaaccaggctggtgatgcactcgcgagcatacgggaacagaatgttcgggcagtatgcgcccaggcaatgcgccatctgagtaccttcaataccgctgatggagaaaataccggcctgctgaacttcgcacaggaacgcggtttcttcccccagggaagccgttacggtaacacgcagcacaacttcataaacgtcatccgccagttgggaagatgccgtatcaagatccagtttaacctctggctgccaatctttctggaaaacatgcggtgcgtttggcgcttcgaaagaaacatccttggtatagatacgttggatctggaaagccatttcagtgttattttgttctgacatgtgtaaaaccctttagtgttgtccttaaatacttgagtacgccttaacgcaacagcggatccagtccaccacgcgcatccagcgcatacaagtcgtcacaaccgccaatgtgctgtgcatcaataaaaatttgcggaaccgtcgttcggccactacgtttgatcatctcttcacgcttcacggcgtcgccgtcaatcgcaatttcctggaaactcacgcccttgctgtttaacagcgcctttgcacgatggcaaaacgggcaggttgctttggtgtagatttcaatattggccatgacttcgctcctgtttttttacccgatggatttcatgtcgacgcaagggcaagtcattccccttgcgtcatgaaaacgacgggtaatcacttaccgcgcaccagaggcagattctcgccgctccagcctgctacgccttctttcaacacaaagaccttttcaaagccggcttttgtcagcgcgttagcggattcctggcactgcataccagaaccgtcgaccacgataatcggcttgtctttgtgcttttccagttcgccaacattgttggctttgatttcgctcggcagcaaattggtcgcgccagcgatatggcctttacggaaatcgtcacgttgacgtaaatccacaacaacggcgtcctctttgttgataaggcgcgtggcttcgccgcgtgtaatcaccttaacttttgaagtcagacctttgaacgtggtaaataaaaccgccaccagtaacgcaatccaggcgatactcagtatgggatgacggccaacaaattgcataatttcttgcatggggggtaacaactcccgacgtagtgattaaaaaaccaggaaaggagtatacctgtgcagtggcgcaaatacagccagagcgtgcactggaatgcatttttgcggggcgctacgaaaaaaaatcacgctattacttgccttctcacgccagcgcgatccctttctttgatcttctgaggctattttatcgattcagctgtagtaaaattacgcaattattttgtctattgagtatgaggttgtcgcaatgtcggtttctaaaaaacctatggtactggtgattctggatggctacggctaccgtgaagaacagcaggataacgctatcttaaacgccaaaaccccggtgatggatgctctgtgggcaaaacgtccgcataccctgatcgacgcatccggtctggaagtgggtctgcctgaccgccagatgggcaactccgaagtgggccacgttaacctgggcgcaggccgcatcgtttatcaggacctgacgcgtctggacgttgaaattaaagaacgtactttctttgctaacccagtcctgaccaatgcggtagaccaggcgaaaaacgccggtaaagcggttcatattatgggtctgctgtccgcgggcggcgtccacagccacgaagatcacattatggcgatggtggagctggccgcagagcgcggcgcagaaaaaatctatctgcacgccttcctcgacggtcgcgacacgccgccgcgcagcgctgaagcctcgctgaaaaaattcgaagacaaattcgccgcgctgggcaaaggccgcgtggcgtctatcgtcggtcgttactacgctatggaccgcgacaaccgttgggatcgcgtggaaaaagcgtatgatctgatgaccctggcgcagggcgaattccaggcagataccgctgtggctggcctgcaggccgcttacgctcgtgatgaaaacgatgagtttgtcaaagcgaccgttatccgcgccgagggccaggctgatgcggcgatggaagacggcgacacgctgattttcatgaacttccgcgctgaccgcgcgcgcgaaattacccgcgctttcgttaatgctgatttcgacggctttgcgcgtaagaaagtggttaatctgaacttcgtgatgctgaccgaatacgccgccgacatcaaaactgccgttgcctacccaccagcgtcgctggcgaatacctttggcgaatggatggcgaaaaacgacaaaactcagctgcgtatttccgaaacggaaaaatatgcgcacgtaacctttttctttaacggcggcgtagaagaaccgtttgctggtgaagagcgcattctgatcaactccccgaaagtggccacttatgacctgcaaccggaaatgagctctgcagaattgactgaaaaattggtcgcggcgatcgaaagcggtaagtacgacaccatcatttgtaactatccaaacggcgatatggtcggtcataccggcgtgatggaagccgccatcaaagcggtggaagcgctggataactgcattgaacaggtaacaaaagcggttgagtccgttggtggacaactgttgattaccgcggaccacggcaacgcggagcagatgcgcgatccggcgaccggtcaggcgcataccgcccacaccaacctgccggtgccgctgatttatgtcggcgagaaaaacgtgaaggcggtcgaaggcggcaaactttcagacattgcgcctaccatgctgtcgctgatggggatggaaatcccgcaagagatgactggtaagccgctgttcatcgtggaataatccctccccatgaggggaaaggcgattaacaccattcaacaggccgtgaaaccaagaacgttttcagtcaggcctttgttctacgccagcgtacttagcgctggcgtattgttgtgcgccttttccgcccacgcggatgaccgtgatcaactcaaatctattcaggccgatatcgccgcgaaagaacgcgacgtacgccagcagcagcaacaacgcgccagcctcctggcacaacttaaagcccaggaagaggccatctcagccgcagcacgtaagctgcgcgaaacgcaaagcaccctggatcagttaaacgcgcaaattgatgagatgaacgcctcaattgccaaactggagcagcaaaaagccagccaggagcgtaatcttgccgcgcagttggacgccgctttccgccagggcgaacacaccggcattcagcttattcttagcggagaagaaagccagcgtgggcaacgcctgcaggcctacttcggctatctgaaccaggcgcgccaggagactatcgccgagctgaaacagactcgcgaacaggtcgccacgcaaaaagccgagctggaagagaagcaaagccaacaacaaacgttgctgtatgagcagcgcgcccagcaggcgaagctggaacaggcgcgtaatgaacgtaagaaaacgcttgccggactggagtcgtctattcagcaaggccagcaacagttaagcgaactacgcgccaacgaatcacgcctacgcaacagtatcgcgcgggcggaagcggcggccaaagcgcgagcggagcgtgaagcccgcgaagcgcaggcggtacgcgataagcagcaggaagcctcgcgtaaaggcagcacctataagccgacggaaagcgagcgctcgctaatgtcccgcaccggcggtctgggcgcgcctcgcggtcaggcatactggccggtacgcggcccgatcttgcatcgctatggcgaacggctgcagggtgagctacgttggaaggggatggtgatcggcgcgtcggaaggcaccgaggtcaaagccatcgccgacggcagggtgattctggcggactggctacaaggctatggcctggtggtggtcgtagagcatggtaaaggcgatatgagcctttacggctataaccagagcgcgctggtcagcgtaggcgcgcaggtgcgcgccggacaacctatcgcccttgtgggcagtagcggcggtcagggcagaccctcgctttatttcgaaattcgtcgccagggtcaggccgtcaatccacagccgtggttgggaagataagttttgcctcagtttcgtcgctccattctcacgctggccactttgctggcgtttgcacatcccgttttcgctggcaagctcgccatcgtgattgatgattttggctatcgcccgcacacggaaaaccaggttctggcgctgccgccaaacatctccgtcgctgtactgcccaacgcgccgcacgcgcgcgaaatggcaactaaagcgcacaatagcgggcatgaggtgttaatccatctgccgatggcgccgctaagcaaacagccgctggagaaggatacgctgcgaccagatatgagcagcgatgagatcgagcgcattatccgcgaggcggtaaacaacgtgccgtatgccgtcgggcttaataaccacatgggcagcgcaatgacttccagcctgttcggtatgcaaaaagttatgcaggcgctggaacattacaatctctattttctcgacagcatgacgattggcaatagccaggcgatgcgcgcggcatccggtacgggtgtgaaagtgatcaagcgcaaagtgttcctcgacgatacgcaaaacgaggcggatatccgtcgtcagtttaatcgcgctatcgaactggcccgtcgcaacggttccgctatcgcgattggtcatccacatcccgcaacggttcgcgtgctgcaacagatggtttatcgcctgccggcggatatcaccctggtacgtccaggcagcctgctcaacgaaccgcaggtagatacgtcccgacctggtgtgacgccgcagaaaattgacgcgccgcgcaatcccttccgcggcgtaaagatgtgcaagccgaaaaaaccgctgcaaccggtctacgctacgcgctttttcagcgtcatcggcgagagcattacgcaaagttccgtggttacctggtttcagcaccagtggcaaggctgggggaaaatcgccgcgcctaaaaacgtgagcgctaagacagattgagcgccttacgggccatacgacggtgcgacaaggttttgtcgcgccattgccacagccggaaggaccagagcagcgtctgataagctgctttcgcgctgcggacgttagccatcatccgtctatacatgccagaagtaaaaatttcggcaatcatacgctggcgggtcaaaatatcaggctctttacgtaccgcatgacaaacgcgtaacgcttcccaggtaatttgctggcgaaattccgggtaaatcggaatacgacgggcataatcacgattgagcttttctaataatcgcgtaattttaatataatgccgctgataattaagatttttattgccttgtctttgcaaacggcttaccgaattatcatgcaggaaatatttatataatgattgttcggtataacgtacgcgcgtggcattaaacataacttccgtcgaccataatatgtcctgatgatgtagtccgggaacgaaagtaatattgttatcggtaattaacgcacgtcgataaacgcccatccagacaacatgcgtccagcgccgcgaggccaacgccatacgcaaccaatccggtccgcttaataccccggtggaacgcagacgatcggtcggaatagattgccaggcgtgcccggtttttcggacgcaccagtccgcattacactgcgcaacgtccagatcatcgttaagcgccatagtcatcagcgtttcatacatcttcgggtagacctggtcatccgcatcgacaaaggcgacataatcgccggtcgccgcttgcaggccaagattacgggcgacagatgcgccagcattggcctgatgaagcagtcgaacatgtgggtaatgttccgcgtaatgttttgctatctcaacggaatgatccgtcgatccatcattcacaataataatttccagcgccgaccacgtttgcgcgattaacgacgccatgcaagcattaaaatccgctcccgcattatataacgggacaatgatactcactttggttttactatttttcataacgattaccagaaaaaccttaatttaccctgcctttatactgtggctctattaagaaactattaagccgccataattaatttttacagtaaaaagcaagcacaaaactcagagtagagcgtgacgttagcgagtaaaataagagtaaagcgcaattacgaatgcttgatgtctatgacaattctttacggctttccagattttccctaacaaaaaaggttggcgaatgacaccaaccttttacgatgaaacgtatatcagacccgataaaattatcgggtctctatacccttcatacttcaagttgcttatgtgttggctacggattactcggcccatccatgggcctcgccctgacgggccgtcgcaagcgacgttcaaatctgctcccggcagatttgtcgttcaccccagtcatatagttatctatgctcctggggactcactcccttgccgcctttaagcaactcgaattattttgggtatatacatattaatcccagctcagaataacttttcctgactggcctgaacgcatggcatcaaaacctttctggaaatcatcaatagagaaacgatgggtgataatcggtgacagatccagaccggactggatcagcgccgccattttgtaccacgtttcgaacatctcacgaccataaatacctttaatgaacaagcccttaaagataacttttgtccagtcgatagacatatctgatggcggaatccccagcatcgcaatacgaccgccgtgattcatggtgtccagcatggtacgaaacgccggcggcgcgccggacatctccagacccacatcgaacccttcggtcattcccagctccgccataacgtcgttcaggctctctttcgcgacgttgaccgcgcgggtgacgcccattttacgcgccagctccagacggtattcattgacgtcagtaatcaccacatgacgcgcgccgacatgtttcgccaccgcggcggccattacgccgattggccccgcccccgataccagtacatcttcgccgaccagatcgaaagacagcgccgtatgcaccgcattaccaaacgggtcgaaaatagaggctaaatcatcagaaatgttatccgggattttaaacgcattgaacgccgggatgaccaggtattccgcaaagcagccgggacggttgacgcccacgccggtggtgttgcgacacaggtgagtgcgaccgccgcggcagttgcggcaatgaccgcaggtgatgtgaccttcgccggagacgcgatcgccgattttaaagcctttcacttcctgaccgatgccgaccacttcgccgacatattcatgccccacgaccatcggaaccgggatggttttttgcgaccagtcatcccagttatagatgtgaacgtcagtaccgcagatggctgttttacggattttaatcagcaaatcgttatggccgacttccggttccggaacgtcggtcatccagatgccctcttccgctttcagtttggataacgctttcatcttacatcctcaggcaatcacgcccagttgtttaccaatacgcgtgaacgcgtctaccgcacgcgtaatttgctcaggcgtatgcgccgcagacatctgggtacgaatacgcgcctgaccttttggtacgaccggatagaagaaaccggtaacgtaaatgccctctttttgcagttcgcgggcaaatttctgcgcgacaaccgcatctcccagcattaccgggatgatggcgtgatccgcgcctgccagcgtaaatcccgcggcagacatctgctcacggaactgccgggcgttcgcccacaagcgatcgcgcagttctgcgcccgcttccaccatctccaacactttaatagaagccgccacgattgccggcgccagggagttggagaacagatatgggcgggaacgctgacgcaaccactcaacgacctctttacgcgccgcggtataaccgccggatgcgccgcctaacgctttgcccagcgtaccggtaataatatctacgcggcccattacgtcgcagtattcatgggaaccgcgaccgttttcgccgacaaagcctaccgcgtgagaatcatcaaccatcaccagcgcatcgtatttatcggccagatcacagacgcctttcagattggcgatgacgccatccattgagaacaccccatcggtggcgatcaggacatgacgcgcgccggcctcacgcgcctctttcagccgcgcttccagctctgccatatcgttgttggcatagcgatagcgcttcgctttacacaaacgcacgccgtcaatgatagacgcgtggttcagcgcgtcggaaataatagcgtcttccgcgcccagcaacgtctcaaacaagccgccgttagcgtcgaaacaggaggaatacagaatcgcatcttccatgccgaggaagcttgccagcttttgttccagcgctttgtggctgtcctgggtgccgcagataaaacgcacggacgccataccgaaaccgtggctgtccatgcccgcttttgcggcattaatcagctcagggtgattagccagcccgagatagttattggcgcaaaagttaataacgtggcttccatccgccacggtgatatccgcctgctgcgcagacgtaataatgcgctcttctttaaacaatccttccgcccgggcggtttccagatcgttggttaactgtttgtaaaaatccccacgcattgcgattctccagactgggcaaatttcagcacatattacccaaagcgatacgttgatacgagatgacgcgtcatcacttctttaaaatgcagcataaatcacgcgtatcctcacgggttatcagtgaatggatgaatagtgttatgataagagcattcatgtctgagacagtctctgacaccataattcaaaggttacagttatgatcatcgttaccggcggcgcgggctttatcggcagcaatatcgttaaggccctgaatgataaaggtatcaccgatattctggtggtggataacctgaaagacggcaccaagtttgtaaacctggtggatctgaacattgctgactatatggataaggaagatttcctgatccagattatgtccggagaagagctcggcgatatcgaagctattttccatgaaggcgcctgctcttccaccaccgagtgggacggcaagtatatgatggataataactatcaatactccaaagagctgctgcactattgtcttgagcgcgaaatcccgttcctctacgcctcttctgccgccacctatggcggtcgcacgtctgatttcatcgaatcgcgcgaatacgaaaaaccgcttaacgtttatggctattctaaattcctgtttgatgaatatgtgcgccagatcctgccagaagcgaactcgcagattgtcggtttccgctatttcaacgtctatggaccacgtgaaggccataaaggcagcatggcaagcgtggcatttcatctgaatacacagttaaacaacggcgaaagcccgaaactgtttgaaggcagcgaaaacttcaagcgcgacttcgtttacgtgggcgatgtggccgccgttaacctgtggttcctggaaagcggcaagtccggcatctttaacctgggcacaggccgtgcggaatctttccaggccgtcgccgacgcgacgctggcataccataaaaaaggtagcattgaatacattccgttcccggataagctgaaaggtcgctatcaggcgtttacgcaggcggatttaaccaatctgcgcaacgcgggctacgacaaaccctttaagaccgtcgccgaaggcgtcacggagtatatggcctggctgaaccgcgacgcgtaagtatgaaaattttggtcattggcccgtcctgggtgggcgacatgatgatgtcgcaaagtctctatcgcacgcttaaagcacgctatccccaggcgataatcgacgtgatggcgccagcctggtgtcgtccgttattatcgcgtatgccggaagttaacgaggcgatacccatgccgttgggccacggcgcgctggaaatcggcgagcgccgcagattgggccatagcctgcgagagaagcgctacgatcgcgcctgggtgttgccaaattcgtttaaatcggcgctgattcctttctttgccaatatcccgcaccgtaccggctggcgcggcgaaatgcgctatggcctgctgaacgatgcgcgcgtccttgataaagacgcctggccactgatggtggagcgctacgtggcgctggcttatgacaagggcgtgatgcgcacggcgaaagatctgccccagccgctactctggccacagctccaggttagcgagggtgaaaagtcgctgatgtgcagcgacttttcactatcttctgaacgtcctctgatcggcttttgccccggcgcagaatttggcccggcaaaacgttggccgcactatcactacgccgaactggcaaagcagctcattaacgaagggtatcaggtcgtgctgtttggctcggcaaaagaccatgaagccggaaatgagatcctggcggcgctgaatagcgagcagcaggcatggtgtcgcaacctggcgggggaaacccagctggaacaggccgtcattctgatagccgcctgtaaagccatcgtcactaacgattccgggctgatgcacgtcgcggcggcgctcgaccgcccgctggtcgccttgtatggcccaagtagcccggatttcacgccgccgctgtctcataaggcccgggtgattcgtctcattacgggttatcacaaagtgcgtaaaggtgatacggcgcaaggctatcaccagagcctgatcgatatcacgccgcagcgggttctggaagagcttcattcgctgttgtcggaagagggcgtttaatgcgggttttgatcgttaaaacatcatcgatgggcgacgtattacataccctgcctgcgcttaccgacgcgcaacaggcgattccggggattcaatttgattgggctgtcgaagaagggtttgcacaaattccgtcctggcacagtgctgtcgatcgcgtgattcccgtcgctattcgccgttggcgcaaggcctggttttccgcgcccatcaaagcggaacgcacagcctttcgtcgggcggtatgcgcaaaccaatacgacgctgtgattgatgcgcaggggctggtaaaaagcgcggcgctggtgacgcgtctggcgcatgggataaagcacggtatggactggagtaccgcccgcgaaccgctggccagcctgttctataaccgtaaacaccatatcgcaaagcaacaacatgcggttgaacggacgcgcgagctgttcgccaaaagcctgggatacgataaaccgcagtcgcagggcgattatgccatcgcaaaacattttctgcattgccagcaggcggttagcgatccgtatgcggtgtttttacatgccacgacccgcgatgataaacactggccggaagcaaactggcgcgagcttatcggcctggtgggcaacaccggattacggataaagcttccctggggcgcgcctcatgaggaggcccgggctaaacgactggccgaaggctttgactatgtggatgtgttaccgcgcatgagcctggaggaggtcgccagagtgctggctggcgcaaaatttgtcgtatcggttgataccggcctgagccatctcaccgccgcgctcgacagaccgaatattacgctatatggcccaacggaccctgggttaattggaggttatgggaagaaccaaatggcatgctgctcaccagaacagaacctggcgaatttagatgccacaagcgtatttggaaagattcattaaagagactctgtctcatcccaaacctattgtggagaaaagatgctaaccacatcattaacgttaaataaagagaaatggaagccgatctggaataaagcgctggtttttctttttgttgccacgtattttctggatggtattacgcgttataaacatttgataatcatacttatggttatcaccgcgatttatcaggtctcacgctcaccgaaaagtttcccccctcttttcaaaaatagcgtattttatagcgtagcagtattatcattaatccttgtttattccatactcatatcgccagatatgaaagaaagtttcaaggaatttgaaaatacggtactggagggcttcttattatatactttattaattcccgtactattaaaagatgaaacaaaagaaacggttgcgaaaatagtacttttctcctttttaacaagtttaggacttcgctgccttgcagagagtattctgtatatcgaggactataataaagggattatgccattcataagctatgcgcatcgacatatgtccgattccatggttttcttatttccagcattattgaatatttggctgtttagaaaaaatgcaattaagttggtttttttggtgcttagcgccatctaccttttctttatcctgggaaccctatcgcgaggggcatggttggcggtgcttatagtaggtgttctgtgggcaatactgaaccgccaatggaagttaataggagttggtgccattttattagccattatcggcgctttggttatcactcaatataataacaaaccagacccagaacatttactgtataaattacagcagacagatagctcatatcgttatactaacggaacccagggcaccgcgtggatactgattcaggaaaacccgatcaagggctacggctatggtaatgatgtgtatgatggtgtttataataaacgcgttgtcgattatccaacgtggacctttaaagaatctatcggtccgcataataccattctgtacatctggtttagtgcaggcatattgggtctggcgagcctggtctatttatatggcgctatcatcagggaaacagccagctctaccctcaggaaagtagagataagcccctacaatgctcatctcttgctatttttatctttcgtcggtttttatatcgttcgtggcaattttgaacaggtcgatattgctcaaattggtatcattaccggttttctgctggcgctaagaaatagataaaaaaacgcgctgatacttattacggtatcagcgcgttttccatcatcaggactcaatcacttatcaaaccagtttttcatttgttcctcgaaacgctgcgctacattttcccaactgtattttgaaaacaccagggattttgctttttcggcaatctggtggcgttccttatcagcaagcgcacggttaatatcattaattatactgtcgctcgacataggttctgcgaggtgatagcccgttatgccatctaacacaaattcgctaatccccccttttttgctggcaagaaccgcttttcctgctgccatcgcttctacagccaccatgcaaaatgcttcttcaacctgagatggcacaataaccagatcggctatatgatagaagttatgcatctggtcaggagattgccccccagccataatacaatccgttccaatctcttttgcggcgtccagtactttcttttgatactctgctttttcacccttgcggcttgcataagggtcgccaacaacgacaagtttaatattacttcttaaggtacgtaattgtttgaacgcctgcaaaagcaacaggatgcctttatcaggcgaaattctcccggcatacaagagaacggtggcatcttccgcaatatttaattgctgacgaagattatcttgtgggtttcttttataagtctcagcacaaaaaccattaggcacaatactaacagcagcggcgggcaatctttcttcataaaacgctttaagaaactgactgggcacgataatttttgcatcattatcaggaagttctggttcaaatgcattatgcatgtgcataaccagttttgcattcggattgcgctctctgatctgccgatacagtttcatactattatgaataacaatgacgctatcttcctgggtagtcactttatctctaatattaaggatgcgctgggaatagggtagtgggtcgagacgagtccatttctgaaaaagacgcttataaactttactaaacccgatgtaatgaatatcacagttatcgtttattttattatattcaggatagccagcattctttatacaagcaatagcattcggtattgatagtcgttttgcaacctggtaaatccaggtttctaccgcagccgcaccacgaggaggaattgaaaatataggagtaacagtaaatatgatttttttaatcataatagctataatccagaatagttaactttatagaaaaagaaatgttataaaaaaaagaaatgcgtgccgaagcaacgaaaaataatgatttatctagtgtctagacaattttatcgtaatatatttcatcctcaagctccgaggctgtaatatatggaataatatcgtaatgaattgcagtatcatctgataaattaaagatatttaaatcactcacattttttctcataaaagtaaaaaatggcagtattttaaacagatctttactaagctcagatggcatagggctggtagattcgtcatagaaacgtgggcaactccctgttaagtcaagcccagaacatataatacggccatacttgagggaataggcaacctgaatagcggtataagcaatagtatggcaagagcaatacccgatgctgatatccttgcaaaatccagccagtcgccctcttttcgaaagaggaactgaaataagtaatgctttatgaacccgcttgaggatattaaatttaattttctttaaaaagccccctttttctcggcgataaaaggagcgaataattaaacagttttcttcaatatatttttgatcatccactgaagcctgttcgtacacatcaagattgacgatagtaaactgactgttacggctaaagttataaaaatcttcgcgccgacgatggaggaagcgaatatccgtcagaaggtacaaaaatggcttgacgttattgtttagcaaatattgaacagaaccattgactgcaatgacatctttcattcgtaacaaggacagcggcgtctttctggacgtaggaccagaaagaaaaataatacaatcttcagccgttcttttcgcaataagttgcagaacatcggcgtgagttatgaagttaacgctgcccataaaaaactcgtatgtttatcatgcaacctataaataaatgttatattcaataactaatattacatctcaaattctctcaagtatgtcataacgctgcagcaaataaaagtcagtcagccccttaaattaaaccaaacgtgctacattgatcagcgtttttccttacccttaatacgacgcaagaaatttcggagttttttcttataaatcaataagtaaaatccgatatctctcacattatttttgataccataatgtctttctaaatcaatacgatcctttgcttttcgttgtctggaaggtctttttccggacaaatcgataattctgatctcattgccttgcaggataaagttacctttatggggatcgcccgaaaccataccatgctgatgcagagaatatatcgactgtttgattttccctctcacctcgtcagaaatttctggcatatcaacaagttcaataccttcaatatactcaattatcatcacgtatgtttttacatagcgtaatgttttaatttccgccagcaggtaaaaatcattaagcgccgcaaacccttcacgccgcacacgatctgtctgatgaaaaagcttttcgtagtaatctccttttactaacgatttgaaaaagcgttcagtattttttacttttggactaaatactttgagaatatattttccgtagtctgtattaatcaatacaacttttgtatcttctatattacggaagactttaataacctgatgattataagatagaaaatctttgaatatctcaatgtatttttcaccgtcttttttgacaaagacggtatagtttttaatctttttttcaataatcataatggagatttagggaggggaattatttgtggaaaagtttacgataaagatatgcgcttccagccagaaggcctttaaaataatgaccttgcacgagaagatgtttatatcgcttcttaaattcgactatggtacgcgcatcttttgcgggaaaatctttccagggcgagttcagtcgtgcatttttataatagataactgaaggataatttgcccaggcatgccatggttttgtagcgcccgtataatgaattaaaatagtattatcattaattatattgctatattttttatgtgacttatctttcaactcacttttaatagtataaatagtattatacggtcgcggtagaaaaatgactttatcctgtaggagaatattcaaaacatcctgatcgggatatttaaaagagtcagcctctttacctgccaaaagtaaaaatgcctttttggttaaggcattctctttccataatttcaggttaacaaaaaccacgccggagttaaaataaccaccttgtaaattaaaagcgcttaatctctcatttaccttattctggatggaatcaacatcttttacgaccgcagcgatcttctctgtcagatcaagctgtaaaagatcttgcaaagatcctttgcatacaacatcggcatccaaataaagtaaggtatttaccttcttgctgagataatcgaaagcaaataaacgaaaatacattgctctcgaccatactttagtttgaggcaatacctcaaggctttctactttaataagataaagagaaatttttatgtgatgctgtacggctaaacgctctatatattttacaaaacacggggagtatgagtcacaaataatgtgaaaagcgagcgggatattattgtttaatacaactgaagcgattgatacccccacaccatcaagatagttttcatcaacgccataagaaatgtttaatacgttatcatcattattattactttcatcaaaaactttatattcagctatttctatctcaggaaatgaatccattacatcacctatgggttttattcaagaagtttacgtttaaagtaggctatataataatttatacccgaagtataatgcttctgattaaacatatgctttgccgcataacgtaactgatggctagtcactggatttaaaagtgcacaatgagaccatggtgagttgctcttagcctgtaaaaaatattgtgacacggggtaagccccccaactatgccagggcttcgttggtccgatataatgaacaaatacagtctcagcatcaactggattaataactgaatcttttaattcatagttaagactaaattgtgtattaaattttttatcaacaaaacgcgctttattcactaaaaatatatttaatacatcctgatcaaggtgcgttatgcgctgtactacctctggatcttttagcatttcaatcgctttcttagagatattttctgcagtccaaagaggtatgttaattaaaataaaaccggcattaaaatagccagaaaccagcccaggcgttgccaggctaaccgagcgcttagtccaccattccaactcgccttcagcaacgacagccgcaatctcattttcagcaaaattaagatcaataagttcctgaatactccccttacatgcaatatctgcatccagataaagtactctatctgttttatctgaaaaataatcggcgataatgaatctaaagtatgttgcataggtccagtttttggtactgggtagcgattttaagcgctcacagtcgattaggtaaacaacaatctgcgtagcgtactgttttgctaatgcctcaaatcgctgctggtcttcagagtcaaagaaatcggtaaaaacatggaaagctaacgccttctctggattagcgaggagaaccgatgcaatagagacaccacagccaaaaagaaagtttttatcaatcccataagctatattaaatttatcagcatcactatgttgtgcatagttataatctaaagtctgttgaatgacttcttcttcaaaatattttctgctcatagtgatcacttttgtaatttcgagaatattgcattattaaaatttttaaaatatagcacatcgtaaaatctctcaatcgtgccgggaataatatcatgctgatattttacttcaccagaaataacgcgattaaggtgtcctacaaaatcatctatagcacccggagtgtaaagctcaccattcaaaccgggtttaatcatatcgcgcggaccagacatacaatcagaactaatacacggaattccatatgacattgcttccagcagggtcataggaaatccctcaaatgcagaggtaagtagtaacgcggtgacattttttattttttgctgtacgacttgccacggcgcgctttgccaaccataccagatcacacgctgctcaataccaagctcccgactataggcctggcacttttcaaaatctgagccatcaccaataatatgtagctgccattcccctgtcgtacgagctaagccatcaaataaatctttaactcttttctgcccttcaaatttaagacgccctacatagagaaatacagctggtttatcgcgctcaggcggcggcacaatgactgttttaatagagacaggattataaacgacgctaatatcttgcgctgagataccccgtgccatgatctgttctttaataccactactgatggccagatgataatccgcgtacgttatacattctgcatgttttttatggtcgagcgaaaaatgcggccacgagaaaatagtaaaatgtttaccacttttctttcgtgctttattggcataaagacatgagatgacatcaatacatatcacaatatccggtgacgtttctttcagccactgactaaaattataaacatgcttagctcgacgaagaaaacttaattttatatttgagaatgattgcgcatatttaatctcttttagccatgctttatccattttgtcattacgacaaaagaaaaacatttcacagttgatcttcggagagctattttcaaacgtatggataacgttgctaataacggtttccatccctccaaaaccggataccgcttcgccaataaaagctattttcatatataccccagagttaaaaccttaatctaaagactttagatattaaatagcaaaaatagtaatataaccctatagagtaatttttacctgacatctctctttttgctttaaggcgtagtcaatatctttattattttcgataatggaatatattgccacacctgctggcattataaaaccatgatcaaagcaaagagcaatgtccagtcttcttccaaaaaaatcatcatgttgaattatgtttttttggtttgaaatataacttttaatgttagacattctgtctatccttgtctcactcataaattactcactgagtgcataattattataattacagattttttcttattgtcctttctttaattcgagcggctttaacatctgcctgatgaatcaaccccgattctttttgcaaaatctctcgcagggggagagagaaatactcacgcataaaccggaatatatctcgctgagtcaggccaatattcattgaagaaaaataaagcccaattaaatctttgtcacgccagcgaaggggaacgtgctggcgtatctgcgcgcgatgcaggtcaattacggagatttttaaatcctcttcgcgaccagtgaaaggtaaatgcagaagaaagtggcaaatataacagtcgcgatggttaattcccccggcgtgcattttacgtaccatagtcgcaacacgcttaatgatcatccacttcacctgcgcgtccggtggattaacagcccagtcagcacagtagtcttcaaggctaatggtgggcgttaaatcttcggtgataataaatgatgttctggttagcgggtttacgcctttttcaccaaaaccaacgccgtgcatcgtatcaacgcccagctcatgtagacgatgaatggcgtgccattctctgtcagcgcccagaacaggcatacgtaacgaaatcaggttcttcacaatttctttcagcgaagtacctttatgccacttcaggaagtagcttttaccgtccagctcaaaccgcaatgttcgacgcgtctccagctctctgaacacttcgccctgtaacgtttttacttcctcaaaagcatctttaccgcgccatagtgtggttaacggcgctttcagctcaaccatctaaatcacctgtaataatatccgcggccttctccggtaagctgtataaatcctgggtatcagcataataccgcgcattttcagcccaggcgttgcgtaaggaaggctgtgtcagcgctttgagtaaaacctcatttagcgcatcctggcggaatggttcagtcatcgcttcgccacagtttgcatccacaatataatgtgcataaccgcacaccgcggttgtcagcaccggcaaaccagcagtaatggcttccagcaaaacaataccagcagcttcctgataggctggatgcagtaaaaggtcggctgccgccattaactccgcgatatcattacgtccggagaaaaaatgcacattcgtgccgacgccgcttctttcagccagtgctgcaaacttcttcggcttatcctgcccgacaacatagagcaccgtattttgccgtaaagattcgggtagcgatgccagcgcttcaatagagcgatccacacctttacgggtaaagtcagaccctacttgcaacagtaatttttgctgttctgagataccatttttctgacgataaatttgacgactgtttgggatctgttggctatattttctgtccgggtaaatccccggaggaagaatatggaaacgctccgcttcagtctgataatgtttttggaagtcagcaatctgcttattcgtcagcattaatagttgcgtcggcttgccgtgttcaaacgtggcgcgttcaaaagcagcataatgccgatagcgtgatgtcaggcgatagaaaaatcctttttcctgtgcgactttttcggcgtaacacacgtctgcggcgtaatacacatcaaggcccggcatcttattgaatccaaccacccgatcgacagggtggtcgcgcaaatggtgttgcacccaggcataatattctgcgttacgaccgtggttcgtccgggatttaaccggcacgcggattaattcaaagttatccgggcattccccttcccatgactgagtataaacacgaacctgatgccctcgcgccgccacggtttgggcaatgcgcataaaatcacgctgcagaccgccaaaaggaaaatatttatataagcaaaaggcaactctcatagcaggctgtccaaatctatggtgcgtgcctcatgcggcagcattttttccgtcgcggcgataacatcttcagccggaataacggaaaggtattttttattacgatcaagctcatgccgttcaggcatcggctgataatttcctgcccaaaactgaatgatgtcgtcggtccagggacgccagaatacatgatccgtcgcgccaaaaagacaaatgaccggcgttttgactgctgcggcaatatgaccgggggccgaatcaacgccgataaagagatccgcatggtcaatcaacgcacccaattcaggaaagcgagttttacccgccagaccagtaaccggttttgtctcacagccgcgtgcaatagcatccacgcaggccatctcgtctgcggccgggcctgacgtcagtacaacttgataaccgcggcgctgcacggcatcaataacctgcgagaatttatcattatcccagcacttaaatagctgccgtgccgtaggctgaataacaacatattgtcgggtcacaccaagttgtttgagctgttgtcgcatgttttcccaatgttccgggcgatagctcatggtggtttccgtgacatactgttttagcgctaacggctttagcgcggataatgtgcgctcaacagcatgttctcccgcataaggtactaaatgcgtaaagctctttttccatagagcagactgacgattaccgaaatcctgcgagatttttatttttgcgtttaaaaaacgcacaataagcgccacgctccactgatcggtgagattgacgaccagatcatacgagttagcacgcaattttttgattagcgatagcgcgtttttgatcttctcttttgttcctgcgcctttgttactgatgccgtagagtgcattaatctccggattttccgacaatatcggtatggtgttctggtaaagaagcacatcgatttttgcatcgggataattctgcttcagcgtgctgatgacaggggtggtaagtaacatgtctccatgaaaacgcatttttataatcagaattcttcgaaatggcttttccacaagcgactctttggttgaaattgtccggataaataagcagaaaaaagcacgctaccgccccaggcttcacagcaacccgatggctaataccgcactcattttagatgcgctagtgtaacacttctttcgcagcaatccgatacgaataatttttatacacaatcatttttttaatcataaattcaaagagataataatttatccccctcttgtgaatggtcattcccattgtctggggcgacaagggcggcaaatttcaatggattgcgtaaaaatgcaaaaataatggggttcagcgcctggaatcctcgcttctgagccaatttggcgcaaaaatgggaaaagtaatggtaaagcccaggctaaatacatagaatccccagcacatccataagtcagctatttactatgctcgaattgctttacaccgctcttctctaccttattcagcctctgatctggatacggctttgggtgcgtggacgtaaagcgccggcctatcgtaagcgctggggtgaacgctacggattctaccgccgtccgttgaaaccgggcggaatcatgctgcattccgtctcggtgggcgaaactctggcggccatcccattggtccgcgctctacgtcatcgctatcccgatctgcctattaccgtaacgaccatgacgccgaccggctcggagcgcgtccagtccgcctttggcaacgatgttcagcacgtttacttgccttatgatttgcccgatgcgctcaatcgtttcctcaataagattgatcctaagctggtattgatcatggagactgagctctggccaaatctgattgctgcgctgcacaaacgtcatattcccctggttatcgctaatgcgcggctttccgcccgctccgccgcgggttatgcgaagcttggcaagtttgtccgtacgctcttgcgccgtatcaccctgattgccgcgcaaaacgaagaagatggcgaacgctttgtggcattgggcgcgaagaacaatcaggtcacggtcaccggcagtctgaaatttgatatttcagttacgccgcagctggcggctaaagccgttacgctacgccgccagtgggcgccgcaccgtccggtctggattgccaccagcacccacgatggcgaagagagtatcgttatcgccgctcaccaggcgttattacatcaattcccgaatttattactgattctggtgccccgccatccggagcgtttcccggatgctatcaatcttgtgcgtcaggcagggttaagctacatcactcgttcttcgggcgaagtaccgtccgccagcacccaggtcgtggtaggcgataccatgggcgaattaatgttgctctatggcattgccgatctcgcctttgttggtggttcgctggttgaacgcggcggtcataacccgctggaggccgccgctcatgcgattccggtactgatgggtccgcatacctttaactttaaagatatttgcgcccgtctggatcaggcgagcggacttatcacgattaccgatgcggctacgctggcaaaagaagtttcctctttactgaccgacgctgattatcgtaatttctacggacgtcacgcagttgaagtgctgtatcaaaatcagggcgcgctccagcgtctgctgcaactgctggaaccttatctgccaccgaaaacgcattgaggactgtcatgcaaaaacgggcgatttatccaggtacgtttgatccgattactaacggtcatctcgatattgtgacgcgcgcaacgcagatgttcgaccatgtcattctggctatcgccgccagccccagcaagaaacccatgttcaccctggacgaacgtgtggcgctggcgcaaaaagcgaccgcacacctgggtaacgtagaggtggtaggctttagcgacctgatggccaatttcgcccgcgacagacaggcgaatatcctgattcgtggtctgcgcgcggtggcggattttgaatatgaaatgcagttggcgcatatgaatcgccatctgatgccgcaactggaaagcgttttcctgatgccgtccaaagagtggtcgtttatttcatcgtcgctggtcaaagaagtggcgcgccatcagggcgatgtgacccactttctgccggacaatgtgcatcaggcgctaatggataagttgaaataagtttcctaccttgccgggcctggcattttacttctgacagtgacggcaatagaacgtcgcgcgctgtgcgtgtttcgttgcgactatcggcgtaccgcatacccgacacggctcgcctttgcgcccgtacacctgcaactcctgggcaaaatagcccggcttcccatcgctttgcagaaaatccttcagcgttgtcccgccttgttcaatagagcgcagcaaaacggctttaatcacccgcgccagcaggtcgcactcctctgtcgagagtgacgacgccaggcggtcagggtgaataccagcggcaaacagcgactcgctggcgtagatattccccacgccgaccaccagcttgttatccatcagccagggtttaatcgccgtcttcttcttcgcgcatttctgctgcaaatattcgccattaaactcatcgcttagcggctccggtcccagatgcgccagtacgttatgcccttccagctctttggtccataaccaggcgccaaagcggcgaggatcggtataacgtagaattttgccgttgctcatcaccaaatcgacatggtcgtgcttttccgccggcagcgcttccggcagtatccgcaagcttcccgacatccccaggtgaataattatccagccgtcaggcagctccagcagtagatatttagcacgacgctgaacgctaaggacgggtgtatcgctcagacgataaatttcatctgaaaccggccagcgcagacggccgttacggatatgggcgtgcaggatagtagcgccaactaaatggggttcaataccccggcggctggtttcaacttcgggtaattcaggcataacgtctccggctgtgtggcaggtctcattaatatggggacggccagaaaacaaaaaaccccgccgaagcgaggtttttgttacatcaaagcgagaattatttgattttcgcttctttgtagatcacgtgctgacggacaactggatcgaattttttcagttccagtttttccggtttagtacgtttgttcttcgtagtggtatagaagtgaccagtaccagcagaagaaaccagcttgattttctcacgaatacctttagccatgatttatttcctcttagtacttagtacttttcgccacgggcacgcagttcagacagaactgtttcgatgccttttttatcgatgatacgcatacctttagcagatacacgcagggtgacaaaacgcttctcgctctcaacccagaaacggtgagagtgcaggttaggcaggaaacggcgtttagtcgcgttcagtgcgtgggaacggttgttaccggtcaccggacgcttgccagtaacttggcagactcgggacatgtctattctccaaaaatcaaattagctcgagcttcgtatggggtatcggcgcctcgtcaggctttacagcctggtcatcgcgcagttctattgaactctcgattgccaggcccaaatgccaaacccgagattctcaaaggtggcgtagtatacgctgacccggcgatatgctcaagtcccgaacagacaaagatcccgatggatcgcgcaaagaatcttaaatccagccgcgttcggcaaaagaaacgtactctccgcgcccaattatcaggtgatcgagcacccggatatccataaactggcaacactttatcacgcgctcagtgataagtttatctgctttacttggctctgcgcagcctgaagggtggttatgcgccagaatgaccgctgaagcattgagtttaatcgcttcccgaacaatctcacgcggatgcacctctacgtggttaagcgtgccggaaaacaggcggctgtgctgaagcacccggtgctgggcatcgaggaagatcaccagaaagatctcacgctcttcgcccgtcagttggctttgcagaaattcccgcgtcatttccggactcagcaacgcactttcctcattcatgcgcacgctgtaatagcgccttgccagctcagcaatgcctttcaactgcgcgaatttcgccaggccgatgccgtttacgccgcgaaactgcgcaaagtccgccgacagcaggccatacagcgacccaaagtgctgcaatatctcttttgccaacgtcataacatcttttcccggcgtgccggtacgtaaaaaaagcgccagcagctccacgtcgctgagggaagcaatgccggatctgagcattttttcacgcggcaataattcgtccaacgtatccatacgcgcacctccttttttaaggaagcggcatagtggcacagcctttgggagagatcgacgccccgattttgttcttgcgtagcgcctcgcaaagtggagcgcaggcaaagacacgacgccgtagagattgtgataaaatagccgcctttcaaagtcacccaacaggaaagacatgatgagcctggccggtaaaaaaattgttctcggcgttagcggcggtatcgctgcgtataaaacgccggagctggtgcgccgtttacgtgagcacggcgctgacgtgcgcgtggcaatgaccgaggcggcaaaagcctttattacccccctgagcttacaggcagtgtcgggctatcccgtatccgacagtctgcttgaccctgccgctgaagccgcgatggggcatatcgagttggggaaatgggccgacctggtgattcttgcccccgcgaccgccgacctgatcgcccgtgtagcatcgggtatggctaatgatttagtctccaccatttgcctggcgacgccagccccggtggccgtgcttccggccatgaaccaacagatgtaccgcgctgccgccacgcaacataatctggaggtgctcgcctctcgcggcctgttcatttgggggccggatagcggcagtcaggcgtgcggcgacgtaggcccaggccgaatgctggacccattagttatcgttgataaggccgccgcgcatttcgctgccgtcaacgatttgcgacatcttaatatcatgattacggcaggtccgacgcgcgaaccgctcgacccggtgcgttatatttccaaccacagctccggtaaaatgggcttcgctattgcggcggccgcagcgcgtcgcggcgcaaatgtcacgctggtctccggtcccgtttcgttaccgacgccgccttttgtaaaacgggttgatgtcataaccgcgctggacatggaagccgctgttcaggccgccgttcaacagcagcacattttcattagctgcgccgccgtggctgactatcgcgcagagactatcgccagtgaaaaaatcaaaaaacaggcggcgcaaggtgatgaattactaataaaaatggtcaaaaacccggacattgtcgccggggtggccgcactcagtgacaatcgaccctacgttgttgggtttgccgcggaaacgaataatgtggaagaatacgcccggcaaaaacgtatccgtaagaaccttgacctgatttgtgcaaatgatgtttctctttcaaatcagggatttaatagcgataaaaacgctttacaccttttctggcaggatggagataaagtcttaccgcttgagcggaaagaactcctgggccaattattactcgacgagatcgtgacccgttatgatgaaaaaaatcgacgttaagattctggacccgcgtgttggtcagcagtttccgctgccgacttatgctacttctggttctgccgggcttgacctgcgcgcctgtctcgacgacgccgtagaactggcgcctggcgcaacgacgttggtacctaccggactggccattcatatcgccgatccatcactggcggcagtcatgttgccgcgttcgggcctgggccataaacatggtatcgtgctgggcaacctggtcgggctgattgattccgattatcaggggcaactgatggtttcgatctggaaccgtggtcaggacagttttaccattgaaccgggcgaacgtatcgcgcaaatggtgtttgttccggtcgttcaggccgaatttaatctggtggaagcatttgacgccaccgaacgtggcgagggcggcttcggtcattctggccgtaagtaaattttacgcatccccataacgtcataatactgccgcaagcgctgagtttgcggttatagcgtgggtgctcgcctggcaagtgcttattttcaggggtattttgtaacatggcagaaaaacaaactgcgaaaaggaatcgtcgcgaagaaatacttcagtcactggcgctgatgcttgaatccagcgatggaagccaacgcatcacgacggcaaaactggcggcctcggtcggcgtttcagaagcggcgctataccgccattttcccagcaagacccgcatgttcgatagcctgattgagtttatcgaagatagtctgattacccgtatcaatctgattttaaaagatgaaaaaaacaccagcacgcgtttgcgcctgattgtgttgctgattctgggttttggcgaacgcaaccctggcctgacgcgcattcttaccgggcacgcgctgatgtttgaacaggatcgcctgcaggggcgcattaatcagctttttgaacgcatcgaagcgcagctccgccaggtgctacgagaaaaaagaatgcgtgaaggcgaaggctacacgacggatgaaaatctgctggcaagccaactgttagccttctgtgaaggtatgctttcacggttcgtgcgtagcgaatttaaataccgcccaacggacgatttcgacgcccgctggccgctcattgccgctcagctacagtaacgctgactggatagtggctcacgccttatccaggcgacagaaacataggcccggtaaagcgccaccgggcaattcgcttacacgccaaattcttcccggtatgctcgcacagccgccagatgctcagccatatcaggtttttcttccagataggcaatcaggtctttcagcgtaatgatggagataaccttacaaccatagtcgcgctccacttcctgaatcgcggaaatctcgccgcggccacgttcctgacgatccagcgaaatcagtacgccagccagcgtagccccgtgcgcctgaataatctccattgactcgcgaatcgccgtacctgcggtaatcacgtcatccaccagcatcacgcggccctgtagcgcgctgcccaccaggctcccgccttcaccatgatcttttgcctctttgcggttaaagcagtacggcaggtctttatcgtgatgttccgccagcgcaaccgccgtcgtcgtcgcgatcggaatacctttgtacgcggggccaaacagcagatcaaattcaataccggaatccaccagcgcttcggcataaaaacggcctaacaacgccaggtcgcgcccggtattaaacagcccggcgttgaagaaataggggcttttgcgcccggatttcagcgtaaactcgccaaactttagtacctgcttgttaagcgcaaactcaataaactggcgctgatacggtttcatggattcgctccttttcttactttcatcatttacgaaatttacggacaaaaaaaaggcgacttttcagtcgccttaaaatcaattttctaacgccgccttctgcgtcgccacaatggattcaattccccctcgggccagcgccaacaaagtgagaagttcttcatggctgaacggctcgccttccgcggtaccctgtacttcaataatacggccgtcttcagtcatcacgacgttcatgtcggtttctgctgcggaatcttcaacatattccagatcgcagatcgcttcgccgttaacgatgcctacggaaaccgccgccaccatgcctttcatcggattggttttcagcttaccgttggcaaccaatttattcagcgcatccgccaacgccacgcaggcaccggtaatagacgctgtacgcgtaccgccatcggcctggattacatcgcagtccagcgtaatggtaaattcgccgagcgttttcagatcgaccgccgcacgcagcgcacgcgcgatcaaacgctgaatttccatagtacggccgccctgcttaccctttgccgcttcgcgcgcgttacgggtatgggtagcgcgaggcaacatgccatactctgcggtgatccacccctggccttgtcctttcagaaaacgtggaacgccctcttcaatggaggcagtgcacaacactttagtatctccaaattcgaccagtaccgagccttcagcgtgttttgtatagttacgggtcagggttacgggacgcacctgattagcgctacggcctgctggacgcatattgagatctccggcttaaaacgaatgtggctgcgcattatacggacttccgatggttattcctatcctgacaaggcctggatagctataatcccctcatctctcctttaaaaacgggaacatctatgatccgcagtatgaccgcctacgcccggcgtgaaatcaagggtgaatggggtagcgcgacctgggaaatgcgctcggtaaaccagcgttatctggaaacttactttcgtctgccggaacagttccgtagtcttgaacccgtcgtgcgcgaacgcattcgtacacgcctgacgcgcggcaaagtcgaatgtatgctgcgttttgaacccgatgccagcgcgcaaggcgagcttattctgaatgaaaagctagcgaaacaattagttagcgccgcaaactgggtcaaaatgcagagcgacgaaggggaaatcaatccggttgatattttgcgctggccaggtgtcatggcggcgcaagagcaggatctggacgcgattgccgcagaaattttagccgcactggacggtacgctggatgactttatcgtcgcgcgcgaaacggaaggccaggcgctgaaagcgctgattgaacaacggctggaaggcgtcagcgccgaagtagcgaaagtccgcgcgcatatgccggaaatcctgcaatggcagcgtgagcgcctggtcgcgaagctggaagatgctcaggttcagttggaaaacaaccgtctggagcaagagctggtgatgatggcgcaacgcattgatgtggcggaagagctggatcgtctggaagcgcacgtcaaagagacttacaacattctgaagaaaaaagaggcggtaggtcgccgtctggacttcatgatgcaagaatttaaccgtgagtcgaacaccctggcctccaaatccatcaacgctgatgtaactaactccgctattgaattaaaagtgttgatcgagcaaatgcgcgagcaaatccagaatattgaataattctggcgctcaatatgtcacagagcccgccttatgcgggctctcgcgtttatcggtagtacgtttttaatttccggcgaatagcgtcgataaggcgtcgcttccactctaccgttgaagcccgatactgcataaaaatagcgccttccgcctgctccccggcaagcggcaggacaaaaagaccgcgcttatcggataaattttcataccaggggcgcggtacaatcgccattagcggcgccgactggacagcaggcgcaagttgactgtaatcatgacaaacaaacgccagcggacgttcaaacccggcacgagcctgctgcctgtccagttcgttgttctcttttgtccacggcaaacagtaaatgtgttgataatgctgtagatcagcaaaattcaacgctgtggcattctccagacgtgaacgcaatggcgcgccataaaccgcgatcaaacgcgtagtccccacccgctcgtaatgcagagcgctgacctgcttttgatggtcgccaattgccagcaccaaatcaaccgagctatccaacagttcatcacgccagggtcggcgggcaaaaggaaggcactcgatcaccgcctgatgaagatgacctttctctgcgagaactggcgtaagcagcgcgttcaatgcgggaggaagtaccacccgaaaacaacgggagccgttctctttatcgccaaacagctcctcattaagcgaaacaaacacaggcgccaatttgtcacgcagcgcctgcgcataaggcgtaggaatctggcggttcccttcccgtcgaaacaacgggtcgtttagcgcatcgcgcaatctcattaacgcatgacttaccgcagaaggcgacaaagccagcttttgcgccgttttccccgtagagctcgtctccagcagcacatacagtacttttaacaggttcatatccatttgcagcaagttcattaaacgtctctcttattgaacctggctaaattactgccaggtatactgcgggcgcttcaatcaggagaacattatgaatcgctatgcattattccttgtatgtatattttcaacatcagcacttcctgccatggcggcattagatccttcacaaccgttatcacccgcgcctccgttatcactgtttaaagcgtgggctaagcctataaagccgtttcaaatcacagaaggcgtgtggtatgtcggtacgaaaaatctctcttctattctgctgaccactccggcagggcatattcttattgatgcggggttggatgaaagcgcaccgcaaattaaagcgaatattgaagcggcaggattccgcctcacagacgtgcgctatctgttgaatagccatgcgcggctggatcaagcggggggcatggcacgtttgaaagcgtggagcggcgcacaattggtcgccagccaacccaacgccgatcagatggcgaggggtggacgacaggattttgcgcttggcgatgcgctcccctttccgcccgtcaccaccgataaaattatccaccaccaggaaagcatcatcctcggagggataaccgtgacagcactattcacgcctggacatctgcccggctcaacttcctggcgcgtaacgctccgcaacggcaagacgctaatttacgcagatagtctcgccacgcccgactatctgctgattaacaacaaaaattaccctgacctggttactgatattcagagcagctttaagacactggccgcccagcatgttgatatctttattgccaacaaaggtgaccgcttcgggctactggagaaacgacagcaacttcgcaacggcgatacacaggcattctttgattccaatggcttgcaacagtatgtggaacgctcgcgccagcgcttcatcacacaacttaccgcacagcagccataatgaaataactcaccggcggcgcgtccagggcgccgttcttttaaattatctaagtcaaaatagaaaaacctcgcatacaataaaccacaaaaatgatgttcaatttattgatatttataataaataattattaattataaatttaaaatcattactaaaatttattaatcgtgtaatgccttagaaaatctcaatcgtgatacagcgcacaaatcgttaatcttcgcccccagtaaattagggggaaatcatgctgttgcacgttctttatttaattggcatcactgccgaggccatgacgggcgcactcgctgcgggtcgtcgtcgcatggatacattcggcgtaattattattgctaccgccaccgccattggtggaggctcagttcgcgacattctgctcggtcactatccgctgggttgggtgaagcatcccgaatatgtcattattgtggcgactgccgctgtattgaccaccattgttgcccccgtcatgccctatttacgcaagcttttcctggtacttgacgcgctggggttggtggttttctctattattggcgctcagatagcccttgatatgggcgaagggccaattatcgccgtggtggccgccgtcactactggcgtctttggcggcgtgctccgcgatatgttctgcaaacgcattccactggtgtttcaaaaagagctatatgccggcatttcgttcgcctcggcggtgctctatattgcgctgcaacattacgtcatgaatccggatgtcgtcgttatctctacgctactgtttggctttacagcaaggttattagcgctacgtcttaaacttggcctgccggtattttattaccgccatgaagggcactaagacccaaatccgggaatatgctgagcagccagccatctgctcagcgctttgatctgcagattattccgccagtcgatgactctcccggcacgacgctcgcccgtcgctggtaactgccgccagtgttgctctgttcgcattaataactgctcccatgaacgatcgccgctggcctgtaatgcagcctgcgttaaggggatatccatcgccatgatccagcgggtaaacggctgccggcgcgccaggttaaattgccgccatatctgctcgctttttcctttagcaaagcctggcgtgttggctatttgcgctgacgtcagggtaagccaggagaagatatgctcaaagcgatgcgtctgatgcaaggcccgccagctggcttcacccattccgtccagacccaacgccgaccgtgaccccagccatatcagcctggagataaactgttcctgacacgttgccgacgcgtaaaagcaggtcagcgagttgaaatggctatcaggcggtacaggcttactccgctcacgactccgccagacgacctcatcaagccggggaatgccttgcccggccagactcaccaggatctgatcgcccggcgcgatatcccacgcttcccaacgtttcacagaaccgatattgacccgctgaacccgcttatcatccaatataacggggacaagcgacgctactacggtaattttgccgcttttccccaccgagaactgaatagcgctcacttgcgcgacctgcgctactggcggatatttccatgctgccagccagtcgccctgcccgggtcgccagtgttgtgacgcaggttctttagccatgcgtatcactacgccatccgttacaaagggtaatgctgacgtcagccatgactggcgcgcccgctcgacctcgctggcatcttttaccgccagggtatatttattcgtcagactgaatccagccttagcaagttggcttaatctttcgggcatatttgccggaccgtccggccacgcccaaataaaaatacccaacgaatttagcgcggaggcgttatcctggcgcattaacattcctgcgactttcgagcgcgcattcatcccgcccatccgttgctggatatgtccctcgcgctgtagaaagatttcgccctgtaacaccgcgttagcaagcgcgccttgtgttgtctgcggtatagaggggatcaggcgaatttttggcgtccagtcctcgccttgtagtccgttaccccggctaatggccctggtcagtttaccgttttgataaaccagtgttaccgctacgccatccacttttggctgtacccaaagctcgctgcgcccgcgcatccactgttctaccgcctgtcggtccgcgagtttacgtacgcccgtgtgcgcaacagggtgcattgttgtaccgtttaacggcggtgaaaccggagtagatgaaacatcctgaccaacacagcgttgccactgaaccagccttgcgctgagttggtcgtacacactatcgtcaaccgcgctaaccccttgtttccagtagatgtcattccagtcagcgagctgttgctgtaaacgggcgatttcttcagcggcccttgctggcggccaggccgggcaaagcgccccactctgcgaatgccacaataaaattccccacgccatacttttccataatctcatcacgacctcctgcgcacattgcccggcaggtatagcgctttagtgaataaaaaccgacaggtaaaaatgcatcatccgagccgctttccagattttttggtgggttgctgcaacgacgcgataaaagcggaaaaagggacgcaaaatgcaataatctggcgcaaaaagtgtgacaaagactacgtcgcataacggcgatgtgtataataagcccgtatcaaggctctatttcgataatcacagacgtaagatactcatggctcaaggtacgctttatattgtttctgcccccagtggcgcgggtaaatccagcctgattcaggctttattaaaaacccaaccgttgtatgacactcaggtttccgtttcacataccacgcgcgcgccgcgtccgggtgaagtgcacggtgagcactatttctttgtaaatcatgatgagtttaaaaccatgattggcagggaggcgtttctggagcacgcggaagtgtttggcaattactacggcacttcgcgcgaaaccattgagcaagtgctggcaaccggcgttgatgtttttctggatatcgactggcagggcgcccagcaaattcgcgaaaagatgccgcaagcacgcagcatttttattttgccgccgtcaaagatcgaattggatcgccgtttacgcggccgcgggcaagatagcgaagaagtcattgccaaacgaatggcgcaagcggttgcagaaatgagccattacgccgaatatgattatcttattgtgaatgacgactttgataccgcgttaagcgacttgaaaaccatcattcgcgctgaacgtctgcgtatgagccgccaaaagcagcgtcataacgctttaatcagcaaattgttggcagactgaacccactttcagtatcatgcccagtcatttcttcacctgtggagcattttaagtatggcacgcgtaactgttcaggacgctgtagagaaaattggtaaccgttttgacctggtactggtcgccgcgcgtcgcgctcgtcagatgcaggtaggcggaaaggatccgctggtaccggaagaaaacgataaaactaccgttatcgcgctgcgcgaaatcgaagaaggtctgattaacaaccagatcctcgacgtccgcgagcgccaggaacagcaagagcaggaagccgctgaattacaagccgttaccgctattgctgaaggtcgtcgttaatcacaaagcgggtcgcccttgtatctgtttgaaagcctgaatcaactgattcaaacctacctgccggaagaccagattaagcgtcttcggcaggcgtatctcgttgcacgtgacgctcacgagggccagacacgttcaagcggtgaaccctatatcacgcacccggtggcggtggcctgtattctggccgagatgaaactcgactacgaaacgctgatggccgctctgctgcatgacgtgattgaagatacccccgccacctatcaggacatggaacagcttttcggtaaaagcgttgccgagctggtagagggggtgtcgaaacttgataagctcaagtttcgcgataagaaagaggcgcaggccgaaaactttcgcaaaatgattatggcgatggtgcaggatatccgcgtcatcctcattaagcttgctgaccgtacccataacatgcgcacgctgggctcgttacgcccggataaacgtcgtcgtattgcccgtgaaacgctggaaatctacagtcctctggcgcaccgtttaggtattcatcacatcaaaaccgagctggaagagctgggttttgaagcgctgtatcccaatcgttaccgcgtcatcaaagaagtggtaaaagcggcgcgcggcaaccgtaaggagatgatccaaaaaatcctctctgaaatcgaaggacgtttgcaagaggcgggaattccgtgtcgcgttagcggtcgcgaaaaacatctttactcgatctactgcaaaatggtgctcaaagagcagcgttttcactcgatcatggacatttacgctttccgcgtcatcgttcatgactccgatacctgctatcgcgtactcggccagatgcacagtctctataagccgcgtccgggacgggtgaaagactatattgccattcccaaagcgaacggctatcagtctttgcacacctcaatgatcggcccgcacggcgttcctgttgaagtccagatccgtaccgaagatatggatcagatggcggaaatgggggtcgcggcgcactgggcgtataaagaacacggtgagaccagcaccacggcgcagatccgcgcccagcgctggatgcagagcctgctggagctacaacagagcgccggtagttcgtttgaatttatcgaaagcgtaaaatccgatctcttcccggatgagatttacgttttcaccccggaagggcgcattgtcgaactgcccgctggcgctacgccggtggattttgcctatgcagtgcataccgacatcggccacgcctgcgtcggcgcgcgtgtcgaccgccagccttatccgctgtcgcagccgcttagcagcggtcagaccgtcgaaattattaccgcgccgggcgcgcgtcccaacgccgcctggctgaactttgtcgtcagctctaaagcgcgcgctaaaattcgtcagttgctgaaaaacctcaaacgtgatgactccgtaagcctgggccgtcgtctgcttaaccatgccttaggcggtagtcgtaagctggcggaaattccgcaggaaaatattcagcgcgaattggatcgtatgaagctggcaacgcttgacgatctgctggcggaaatcggtctcggcaacgcgatgagcgtagtggtcgcgaaaaatctgcagcaaggcgaagccgtggtgccgaccgttgcgcaatcgaatcacggccacctgccgattaaaggcgcggatggcgtgcttatcacctttgcgaagtgttgtcgtccgatcccaggcgacccgatcatcgctcacgtcagcccaggtaaaggactggtgatccaccacgaatcctgccgtaatatccgtggataccagaaagagccagagaaatttatggcggtcgaatgggacaaagagacggagcaggaattcattaccgaaatcaaggtggaaatgtttaaccatcagggcgcgctggctaacctgacggcggcgattaataccaccacctccaatattcaaagcctgaatactgaagagaaagatggtcgcgtctatagtacctttattcgccttaccgcacgcgatcgcgtacatctggcgaatatcatgcgcaaaatccgcgtgatgccagacgtcattaaagtcacccgtaaccgaaactagcgctatgaatccaaaacgttatgcgcgtatatgcgaaatgctcgccaggcgtcagcctgatctcacggtctgcatggagcaagtccacaaacctcataacgtttctgcaatcattcgtaccgcagatgccgttggcgtccatgaagtccatgccatctggccaggtagccggatgcgcaccatggcttctgcggcggcgggcagcaacagttgggtacaggtgaaaactcaccgtaccattggcgatgcggtagcccatttgaaaagtcggggaatgcagattctggcaacccatctttctgataaggccgtagactttcgcgagattgattacacgcgcccgacctgtattctgatgggtcaggagaaaaccggtattactcaggaagcattagccctggcggatcgggatatcatcattccgatgatcggcatggtacagtcgctgaacgtttccgtcgcctccgcgctcattctttatgaagcccagcgccagcgacagaacgcgggcatgtatctgcgtgaaaatagcatgttgccggaagatgaacagcagcgcctgctgtttgagggtggttatccggtgctggcgaaagtcgctaaacgtaaaggtctgccttatcctcgcgtcaatcagcagggcgaaatcgacgccgatgctgactggtgggcgacgatgcaggcggcagggtaatcaccatgtcaggccgcttgttagacgctgttccgctcaattccctgacaggcgtcggcgcagcgcaaagcagtaaactggcgaaaattggcctgcacaccgtgcaggacctcctgctccacctccctctgcgttacgaagaccgcacccatctctaccccattggcgaactgctgcctggcatctacgccaccgttgaaggcgaagtgctgaactgcaatatcactttcggcggtcgtcggatgatgacctgccagattagcgacggttccggcattcttaccatgcgctttttcaattttaacgcagcgatgaaaaacagcctggcgacgggacgacgtgtgctggcctacggggaagcgaagcgcggcaagtatggcgcagagatgatccatccggaatatcgcctgcagggcgatctcagcacgccggaacttcaggaaacgctcacccccgtctatccgaccaccgagggcgtgaagcaagcgacactgcgcaagcttaccgatcaggcgctggagttgctcgacacctgcgccattgccgaactactgccgccggaactggcgcagggtatgatgagcctgccggaggcgctacgtaccttgcatcgcccgccgccgacgctccagctcgccgatttagaaaccggcaaacacccggcgcagcggcggcttattcttgaagagctactggcgcataatctcagtatgctggcgcttcgcgcaggcgcgcagcgctaccacgctcagccgctaagtaccaacaacatattgaaagacaagctgctggcgtcgttgccgtttaaacccaccagcgcgcaggcgcgggtggtagcagagatcgaacgtgatatggcgctggatgtgccgatgatgcgtctggttcagggcgacgtgggttccggtaaaacgttggttgcggcgcttgccgccttgcgcgctattgcccacggtaagcaggtggcgctgatggcgccgaccgaattgctggctgaacagcacgcaaataatttccgcaactggttcgaaccgttgggcgttgaagtgggttggctggccggtaagcaaaaaggtaaagcgcgtcaggcgcagcaagaggctattgccagcggtcaggtgcagatgattgtcggcacccacgctatcttccaggaacaggtgcagtttaacgggctggcgctggttattatcgatgagcagcaccgctttggcgtccaccagcggctggcattgtgggaaaaaggccagcagcagggctttcatccgcatcagttgattatgaccgcaacgcccattccgcgcaccctggcgatgactgcctacgccgatctcgatacctcggtgattgacgagctaccgccgggccgtacccctgtcactaccgttgcgattccggatacccgtcgccatgaaatcattgatcgtgtgcgcaacgcctgcacaaccgaaggccgtcaggcctactgggtctgtacgctgattgaagagtcagacctgctggaagcgcaggcagcggaagccacctgggaggagctcaagctggcgttaccggagttgaatatcggcctggtacacggccgcatgaagcccgccgaaaaacaggcggtgatgcaggcctttaagcagggcgaactgcatctgctggtcgccactacggtgattgaggtgggggtcgatgttcctaacgccagcctgatgattattgaaaacccggagcgactgggcctggcgcagttacaccagctcagagggcgcgttggccgtggcgcggtcgcatcgcactgcgtgctgctctataaatcgccgctgtcgaaaacggcgcagaagcgtttacaggtattgcgcgacagcaacgacggctttgtgattgcacaaaaagatttagagattcgcggcccgggggaattactgggcacgcgccagacgggtaacgccgaatttaaagtagctgatttgctgcgcgatcaagccatgatccccgaagttcagcgtattgcccgtcatattcacgaacgttatccacagcaggcacaagcgctgattgagcgctggatgccggaaaccgaacgttattccaacgcctaatcctattcgccgcgcgacagagccaacagaagatcctcaatctggatagcgataacgtcctgggctgccagggcatcgcgcgagatacgcgttgccatcgcactctccggctcgtcccgcagcatttccgccgccttctgcaccccgtcgaggatcatctccgacgttaactgccgggttaaaaacgccagattattttccaaccacggttcttccgtcgcacctaatggcggttgccactgccacgagccttctggccaaagcgggttaacctctaccggataaattaaatgtgcggcgtactgcaacgcgcataccgctttacccggcgtatccagtaaccaccactgattccagagcgaacggataaacggcgcaatgccgccgagaacattgaaggtatccagccaggtcagcggagagttgaaaccgcgctcgtgattgattcgcgccagcatggtctccagcaaaaaatgccgtacctgctgacgctgagcggcatccatcatttcccgccagagataaggccgccgtaacgcacgcaggaaagactcctcgaagtgatcgccatagccatgggttaacagcgtttcgcgccaacaggcaaggcacagcggaaacagataacgaaacaattccggctgcatcggttcgtggtaaaccagattcagcacataataaacgctcagatgccaatcggtaatctgccgccagtccgtcgccgccagcgcctgcaactcagcatcggcatagtcaaactccgcttcccacacgttaagaaccggcggctcatcgccaaaaatatgacggcagcgttcacgcagggtttcaggttgacggcaacgttttttcatctttatccggcaaacattggcagcatcaggtacagcttgatcaccaacgcattgacgatatcgataaagaacgcgccgaccatcggcaccaccaggaacgccatatgcgaggggccaaaacggtcggtaatcgcctgcatattagcaatggcggtcggcgttgcgccaaggccaaaaccgcagtgacccgccgccagcaccgccgcatcatagtttttccccatcatgcgccaggtgacgaagatcgcgtacagcgccatgaagatggtctgtaccaccagaatcgccagcatcggcagcgccagtgacgccagttcccacagcttcaggctcatcagcgccattgccagaaacagtgacaaactcacgttccccagcaccgaaacagcacgctcaaatacgcgataaaaacccaccagcgccaggccattgctgaggatcaccccaacaaatagcacacaaacgaagaccggcagttcaagcaccgttcccgccagtagctgcgctacgattttgcccacggtcaaacagatagcaatcagggcgatggtttcgattagcaccagagaggtgatcatacggcccacatccggcttttcaaaggctgtcggcacggcctgatcgtcaggcattccatccggcgtggtggagtgtttcaccagataacgcgctaccgggccgccaatcaacccgcccagcaccaggccaaaggttgcacatgccatcgcaacttcggtggcactggcaaaaccataacgttcgacaaacagtttactccacgccgcgccggtaccgtgtccgccggacagcgtaattgacccggcaatcagccccattaacgggtccagccccaacagactcgccatgccgataccgatggcattctgcatcagcagtaatccgaccacgacgaccaggaagacgccaacaacgcgtccccccttgcgcaggctggcaaggttagcgttaaggccgatcgtcgcgaaaaacgccagcatcaacggatcgcgcagggtcatatcaaagttgacctcccaaccgacgctttttttcagtaccagcagagcaaccgcgaccagtaatccccccgccaccggttccggaatcgtatatttcttcaataaggagacagactggaccagcttgcgacccagtagcagcaccagcgtggcggcgacaagggtcgataaggtatcgagttcaaacatttaaagctcctgtagtgcgctgtgacatgtgcgcacaaatcatttcctgagtcagttttttagctctttgcgagtcttcggcatggattttaagcagaaaaaggcaaaaagttatataaaaaggtgcatttatcttttttaaatattaagaatattcgctcgcaatcgtttgcttttaccatctggtcagataaaatcaccgcttttccaccacgagaatgtccctgatgtccgttaacgccatcgagccggcagatgcgcaaccggttgcgcagacgcaaaacagcgaattaatttaccgtcttgaagatcgcccgccgctccctcaaaccctttttgccgcttgtcagcatctgctggccatgtttgtcgcggtaatcacgccagcgctgttaatctgccaggcgttgggtttaccggcgcaggatacgcagcacattatcagcatgtcgctgttcgcctccggcgtagcctctattattcaaatcaaagcgtgggggccggtaggatcggggctgttatccatccagggaaccagttttaactttgtcgccccgctgattatgggcggtaccgcgctgaaaaccggcggcgcggacgtcccgacgatgatggcggcgctgttcggcacgctgatgctggcaagctgcaccgagatggtgctttctcgcattctacatctggcgcgccggattatcacgccgttagtctccggcgtcgtggtgatgattattggcctgtcgctgattcaggtggggctaacttccatcggcggcggctatgccgccatgagcgacaacacctttggcgcaccgaaaaacctgttactggccggcgtcgtcctggccattatcatcctgctgaatcggcagcgtaatccctacctgcgcgtggcttctttggttattgccatggcggcaggctatcttttggcctggtttatgggcatgttgcctgagaataacgcgccggtctcacaggacatcctgatggtgccgaccccgctgtattatggtctgggcattgactggaacctgttactgccgttgatgctggtctttatgattacgtcgctggagaccatcggcgacatcaccgccacctctgatgtctccgagcagccggtatccggccccttgtacatgaaacggctaaagggcggcgtactggctaacggcctgaactcatttgtttcagcggtatttaatacgttcccgaattcctgtttcggtcagaacaacggcgtcattcagttgaccggcgtcgccagtcgctatgtgggatttgtcgtcgcgctgatgctgattgtactcggcctgttcccggcggtaagcggttttgtgcagcatatcccggaaccggtgctcggcggcgccacgttggtgatgttcggcaccattgccgcctccggggtgcgtattgtctcgcgtgagccactgaaccgccgcgcgattctgattatcgccctgtcgctggccgtgggtcttggcgtctcgcaacagccgcagatcctgcagttcgcgccggaatgggtgaaaaatctgctctcatccggaattgccgctggcggcatcacggctatcgtgctgaacctgattctcccgccggaaaaaccgtaaaaaccctgcggcggcgacacgattcgccgctgctgtaacgctctttcaccattcctgtcttgaggattgcacgcaaatcgtgcataaatcccctatgtgcatttcacgggatggaagaccatgaaattgattgggaggttgcttctctacgtgttgatcgcctgtttagtggtgattttcggcttttattttctgctgcaaacgcgctggggcgcagatcatgtcagcaactgggtatcagagaacagcggttatcacctcacattcgacgtgatggatcatcgtttttccgccccatcccatcttttactggagaatgtgacctttggtcgtgatggtcagcctgctaccctggtcgcgaaaaccgtagatatcggtctgagcattcgccagttaaccgcgccgctgcatgtcgacacgattctgttacaggacggcacgctgaatatttcagtgcaaaccgcccctttcccgtttgaggccgaccgcctgcaacttcgcaatatggcgctcaatagccccggtagcgaatggcgattgagcgcccagcgcgttaacggcggcgttatgccctggcgccccgaggccggtcgggtattgggcaataaagcccagatccaactgagcgctggttcgctgacgttaaacgacgttcccgccacgaatgtgcttattgaaggcagtatcgaccataatcaggtgatgttaaacaccgtcggcgccgatatggcgcgcggagcgttaaccggcgtcgcccggcgtaacgctgatggtagttgggtcgttgaaaatctgcggctgaatgatattcggttacaaagcgataaatccctgagcgagtttttcgcgccgcttactacggttccatctttgcagattagtcgtcttgaagtgacggactccagcctgcaaggaccagactgggcagtcaccgatcttgacctgagtttgcgcaatctgactctgcgcaaagaagactggcaaagccaggaaggtaaattatcgatgaatgccagcgagtttatttacggctcactgcacttgctcgatccaatcctgaacgccgaattttcaccacagggcgttgcgctacgccagttcactacccgctgggaaggcggtatggtcagaacttccggcgcctggttacgcgaaggcaaagcgcttattctggacgataccgctatcgccgggctggagtatacgctgccggaaaactggaagcagttatggatgaagccgctgcccgactggttgaacagcctgacgctgaaaaaattcagcgccagccgcaatctggtgattgatatcgacccggccttcccgtggcaaatcaccgctctggacggctacggcgcaaacctggagctggtacaacatcatcaatggggcgtctggagcggcaatgcgaccctcaacgccgcagcggcaacctttaaccgtgtggacgtgcgccgcccgtcgctgtcgttgacggctaatgccagcacggtcaacatcagcgatctgagcgcgtttactggaaaagggatactggaagccactgccagcgtatcgcaactgccgcagcgtcagacgcaaatcagcctgaacggacgcggcgtaccaatggatgtgctacagcagtggggctggccggcattaccgattgctggcgatggcaatattcagctcacggccagcggcaatattcaggccgatgcgccgttgaaaccgacggtaaacgggcaattacacgcggtcaacgcacaaaagcagcagataacacagacgatgcaagcgggcgtggtgtccggcggggaagttacgtcaacggagccaacgctgtaattgagggcttgcccggtggcgatggcgcttaccgggcttacggttcttgctcatttgtaggccggataagcgcagctcacggcgccatccggcgattcagatttaaagcgtaatcaccacttcatttccctgcggggtgaccactacgcccagttcacttcccgcatatgagccgcatttggtaccgctaatctgcgtaatattacgcagacacagcgtccagttgcgcgccttgccttcgccgctcaccgtaatggtattgcctgtgcgtttcgcctgcagcgtaaagattgtcgaaccatccgtagcagggacttcgcagaccgcttcgcagccgtcatccagatggaataactggaaggccgtaccctcatgccaggcgtaatcgggcttctggctattgttgcccagcgccagtagtgtattgtcacgcacgtacactggcagactcaggaagtcatgctgctgtttatgccagcggctgccctgcacttcatcgttgcgccacaggtgcgtccagcggccttctggcaggtagaactccacgtcgcccgcttcactaaataccggcgctaccatgaccgcatctcccagcatgtactggcgatcaagataatcacacgccggatcgtccgggaactccagcatcatcgcccgcatcattggcgtaccggcttcgttggcacgcgccgcttcccgatacagatacggcatcatccggcacttctgttcagtgaagaagcgcaccacgtcacaggactcgtcgtcataggcccacggaacccggtaggatttgctaccgtgcaggcggctgtggctggagagcaagccgaatgcgcaccaccgcttgtagacatgcgccggcgcggtattctcgaatccgccaatatcatgactccagaagccaaaccctgacaggccgatggacagcccgccgcgcaggctttccgccatcgattcgtagttggcgtagcagtcgccgccccagtgcaccgggaactgttgcgcgcccaccgaggcggaacgggcgaacagcaccgcctcttcaacgccgacggtctctttcagcacgttccacaccagttcgttgtagatgtaggcataatggttgtgcattttctgtggatctgaaccatcaaaccactgcacatccgttggaatgcgttcgccgaagtcagttttgaagcagtccactcccatctccaccaggcccttcagcttgtcggcataccattcgcaggcttgcgggttggtgaagtcgtaaatcgccagtcccggctgccatttatcccactgccacaaggagccgtccgggcgttttagcaaatatcctttctctttcagctcctggaagaccggggatttctggccgatgtaggggttaatccacacgcagactttcagccctttcgctttcaggcggcgaatcatccctttcggatcggggaaagtcaccgggtcccattcaaaatcgcaccactggaaggccttcatccagaaacagtcgaagtggaagacgtgcagcggcagattgcgctcggccataccgtcgataaaactgttaacggtcgcttcgtcgtagttggtggtgaatgaggtggtcagccacaggccaaacgaccaggcgggcggcagcgccggacgacccgtaaattgggtatagcggttcagcacgtctttcggggtcgggccgtcgatgacgaagtattccagatactcgctctcgacgctgaactgaactttggagactttctcggagccaatttcaaacgacacgcactgcggatgattcaccagcacaccgtagccacggttggtgatatagaacgggatattcttgtacgattgctcggtgctggtgccgccgtcgcggttccaggtctccaccgtctgaccgttacgcaccagcgcggtaaagcgctcgccaagcccgtagacggtgtcgcccacgccgagatccagacgctcgaacatgtagttgcgcccgctattggtgtcctgcacatagccgttatttttcaactgactaccggtgatacgtacaccgttacgcagaaaatccagtgaccagatctcgcctttggtgacgcgcacgctcaggctgccgctcttgagttcggcaaattcggcgttgttctgcatctccacgttgatatcttgcaagacattgagcggataatgtgggccgttatccaaagcgccctggaagtgttccatccgtacacctatcactccttcctgcggcgagaaaaagcgtagggtaaacaacggggtatccagttgccaggttcgttcgcggacatcacgcggcgcggcatagatcaccatctcattcccgtgctgttcaacgtcgaacacctgaaccgggtgaatcaaattaaggccaggctggatcagccagtttccgtcgctaattttcatagtctgttcctttagttctgcaattctttatgggtaaattcttgttcattacggtgtgcgccctgcgccagttgttccagaatggttttcaggaacgggcttttcagggtgtagtagcgtttagcgatcgcggcgctcagcagataacagatggccgggacgatagtgaacagagcgatgatgatgctgatcgtggcgctgttttgcgttttcgccgccgcgtcgtaaccgccgcctgccagcatccagccaatcagcgccccgccgagggcaagacccagtttcagcacgaacaacgtgccggcaaaactgatccccgtcaggcgtttgccgttacaccattcgccatagtcgacggtgtcagacatcatcacccactggataggcgtgactaactggtgcaatacgccaatcacaaagataaagacgaacatagcgatcgtggcgtgcatcggtacgaagaacatcgccacgctgattactgcgagtaaagcattggtccaccagaaaacgctcactttgcatttccagtcggtcaacggttttgccagcgccgagccaatcaggttgccgacgcaataggtggtgaggaaggcgacaaacacgcccggtttgcccaatatccaggtgacgtaatacatcatcgccccgccgcgcacgcataccgccagaatattcaggatggtgagcaggccgactatgcgccactggtcgttgtgccagatatcacgcaggtcttcacgcatggaggtatgggtggcaggcgcttcaacgcgctctttggtggtaaagaagcagaacgccagcatcaggaacgccaccaccgagagcgccgcgatacccccctggaagcccagcgccttattctcgccgccaatcagtttcaccagaggcatcatcagtacggtagaaagcattccgcccgccgttgccagcacaaagcgccaggattgcagggagatacgctgcgttgggtcattggttattacaccccccaacgcgcagtaagggatgttgaccacagtgtacagaagggtgagcaacgtgtaggtgatggcggcataaatcattttgccgttcagactgagatccggcgtgctataagctagcacacaaacgataccaaacggcaacgcgccaaacagcacccagggtcggaatttgccccagcgagagcgggtgcggtcggccagcaggcccatacaagggtcggagatggcatcaagcgcacgcgccagtaaaaacatggtgccaacaaaaccagcgggaatgccgaaaatatcggtatagaagaacatcatatataacatgacgttatcaaagatgatgtggctggcggcatcgcccataccatagccaatcttctccttaacggagagaatttcacttttcattacgcatccttaacgctcacaacgctcactaataccggttacagtttttgtaaaccttccctgcgagcgtgaatattccgttatttggttatcaaattacgattcttgttttctgtgatcagggtagcgtcaaaaagtgtgatgaaatgtaactaatggattttatgggggtttatatgaaaccgatcatggcagaaggaaagggaagttaaaaaagcacgggaggggatgtggaaacgccaggaagtagctataatgcgcgcgcctccatgtagcaatcgaggcgcggaagatcgtcgtctccggtgaggcggctggacttcaaatccagttggggccgccagcggtcccgggcaggttcgactcctgtgatcttccgccaacatccttctctcatgcccaccattcgtcctctatttcgggacaaagtatttgcttattattaagactagttcttgcatataatacgaaaggaaaggtggatagagaaagtggaatattattttattaatcaccatttaccgattgctaaaaccgaacgtccatttattgtgggatatcgtctgcaaagaagggataaaagtacgccaggactaacgcgggcgggacttaactaatcaccaaacgaacttgtgggtcatacttacaggctcatcctttctcaaaagagatacgcttaccaggccaaaattatgagatcaacgtatagagccatccggataaagatacatgcctccctccagatacacgggttctccttcttctaccgctaaattatgatatagcgattgcatttcatcatctgcactttcttccggttggttttcaactcgataataggtatctacatcatagttctgtttacggagatcgtcgtcgctgtatacgccaagccgtttttttaagcctgttatattaaatatccattttaacccatctttaatataataggcatcaccataagcattttcatcggggcattctttatagcccatccgcaatgcaacatcacagccatgcttaccaacatatttataactcatatccccccaatatgttgcttcaatatcccagataaaattcataacgaaaacctatcctgataacctatgccacatgaaggatacaatttaaactaaagtacgcgttatattatcccctaagtccgtatcaagtatgcgtattctgtagtaggtagtaatatgttctaatttattaatgtgagttatatatgaagagattatttacagcgatgattatcgcttttattaccgtcacggcatcatccagtgcgcttgcctgcccaaagggtcaacatccacatgggggtacaggctcacatcataagggtggatggtgttcatacgagcagtaacgtcgcagcttactcatctacttgaaggcactatagccttacgtttatcaacgcaggcgctacgtttgtcgatgccgtaactttctgaagaaaaaacatgaacgagttggtatcgatcgcaaagaatatggttaccaacaacagtcaccttgtctccaggctgtcgatattctacggacacgacaggaaaggattttattaattccttagaaaaaccatgttaatcaacaggataaatagttaaaacgtgataaaaggcgtaacctttgcccgcttaaagcgggcaagattgcaggcaagagatgttattatactaaaacataaaaacaggtgaggctggtgtaatgagaatcgacaaactttcactgcttaactttcgttgcttcagacagctcgatattacttttgatgagcacattacgattctggttgcaccgaatggcgcgggcaagacgacagtgctggatgcgatacgcctggcgctgtttccctttattcgtggttttgatgccagcctctacgtaaaagataaatcgctggcgatccgtacagaagatgtacgtctggttttccgccccgaagcgctgaacatggaaatgtcgtctccggccatgattacggctaccggggaatgggaaagtggaaaaacggcaacctggatgctcgacaagcgaggagaacagccgccgcatgaagataagacagcggcgcagcttacccgttggggtgaacaacttcagacgctggtgcgtgaagagcataatttgcagcaggttgagcttcccctaatgctttatctggggactgctcgcttgtggtatcaggaacgttatgaggcacagcctactgaacagcgtctggataacagcgccttttcacgtttgtctggttatgacgattgcctttctgccacatcaaattataagcaatttgaacaatggtatagctggttatggcttagctaccgtgaacatcaaatcacacaacttgaatcaccttcagcaaagttaaaagaaggtgttcgtgttcagcggatgaaagaagctattcaagccatccagcaagccattaactgtctgacgcaggaagtgactggctggcacgatctggaatacagctccagccataaccagcaattggtgatgaaccatccacagcacggtaagattcccttatcccagctcagcgacggcctgcgtaatgcggttgcgatggtagcggatatcgcgtttcgctgtgtcaaactcaacccccatttacgcgatgaagccgccttaaaaacacaggggattgtgctgatcgatgaagtcgatatgttcctgcacccagcctggcagcagcaaattatccagtctttgcgcagcgcatttccactaatccagtttattgtcactacccatagcccgcaggttatcagcacggtaaaacgtgagtctgttcgcctacttgaacaggacgagaaaggtaatggtctggcgtcaataccagcggggcgacctacggcgagccaagtaatgatgtactgcacagcgtgatgggcgtcgatccgcaacctccggttaaggaacaggatgttttcgaacgtgggattatcaatgtatttaaggggttaagccaggagtacaaaaccaataatccttgttatttcggcaagaagattatcgtcaacaatctggtgaagcatgaccgatggggctacagcctgaactggggctggcgacgcgaccagctcgccgatctggaacgaatactctacctgctggatagtaaaaccattcctgacaaccggcatgatgtctctatccggtttatggacttcgtgcgcgataatccgcgtgagcaggtctttgaagacgatatgttcaccatccgctacttttagaagggcagcggacatatcacatttaagcgtctggatctggtggagaatatgaatgatatcgtggcgaagcattatccgggggcgctgcccgcaaaataaacgctatctgcgtaataagcttcaccaggaatttctggcatactaggcagattacggcattgcgagtcagatataagcggaggcggcatggcagacaaatacttaacccaatccccggcaggcgaatttgttatgtttgccagcgatgacggtgaagttcgtgtggagtgccgctttgagcaagagacgctatggctccctcaggcaaccatcgccaacctttatcagatcactccccaggcagttacacagcacattaaagcgatctatgaagaaggcgaacttgagcaaaacgcaacctgtaagtcttacttacaagttcaacaggaaggtagccgtcaggtaagccgcaacaggcttcactacagcctgcctgtcatccttgctgtcggctaccgcgttcgttccccgcgcggcacacagttccgccagtgggcaacccagacgctccagaaatacctgatcaaaggttttgtgatggacgatgagcgcctgaaaaatccgcccgtgggttcatcggctgtacccgactattttgatgagatgctggagcgtatccgcgatattcgcgccagcgaacgtcgggtttatttgcgggtacgagagatctttgcgttagccgccgactatcaaccatcgctcaaagaaaccacgcaattttttcaaaccatccagaacaagttgcattttgcctgtaccggacataccgctgctgaactcattcatcagcgtgctgacgccagccagccgcatatggggctgaccagctataaaggtgaagaggtacgtaaggatgacgtgacggtggcaaaaaattatctcactcaggatgaagtcagcgagcttaaccgcgtagttaacatgtggctggattttgccgaggatcaggcccgtcgtcgtcagcagatctttttacgcgactggcaggataagctggatcagttcctgcaatttaacgaccgtgaggttttacaaggcgcaggtaaagtcactaagaaaatggccgatgaaaaagcgcaggcggaatatagtcagtttgctgaacaacaacggcgcttaaaagaagccgaaggtgagaaggatatcgccggtttgctacaatgggaaacagaacctaaaaagtagctcagaatgccccgaaccccacaagcaaaatcatttgggggcacaatagtgggcaccagtaaaaatccaacaagataaaaatcaataaattcaacagaccaagatatcaaattagactcctgtgattgcatgataccgtcgtgaatatggcggttttatccaggcgtaaagactgtgggtagtaatatcaagacgtgttgcgacgctggaaacagaatggccgcgctcaataacctgttttaccgctttaattataaactcttcgggataacgtttaccgctcatgggctcctctctttaagctatcttaaatgactctgcggtgtctgttaaacctgtggcgattcatttaattttttgtacgtatcccacataatcgtgctattcacatttagagatcacgtcatcgatctgctaacgaaggaatctctatgtgtaaatcccgtctcactgagcatcagaacatcgccgtaattaagttggccgaagccggatgaatggttaaagatatctgccctgaggcggatatttgtgaagtgactgactatatctatggacattgggtttcaccacatcctgtttctcactaatgtgctccgggaaagagttttcatcagatgagcgattgaaaagagaagccagaagctgaagttgcttcgaccaataagtctgtcacttgctcagactgtcacgatcagaattaagtcagaccaacttattggcaaggtataactcccggcattaagttacaaaattttctcatggcattagcattacacctccttaaagtttacatgcgtctctataaaagagtcttaaatttgtatataagaagttgatgagagcacaaatttcaccattaagtcattgaatagcaatgcaataaaagaaaaaatcttaaattaggttttaataataagaattcattacaggttgacaggaattacttttatatttcatcacatcaccccgatagtgacgaaggcagcagacagatggtattgagaaccgttatttatcaccctcatgatttagcaaatagtgctgttttaagattttttatgatattggagatactgtataaaaatctcaatgagtgaaatacgaatccgaaatgatgtattacgactgtcggatctgtcatggttccttaaagctgtattttaggtctttccaggagtttatgacactgacaatatttcgcgacttttgacagtcgtagtactttatattatctggattgacacatttatttaccaatgaaatattaatagaaacatcgacaggagtcgttcaggatgatgagaaagccttcacaaattgtccattgcattagttgcgatttatcctgtcaattatttcctgacagcgcagtacgggtgcaatactgtcataatgcggcattttccatctggccagatggtaatgctttcctgaaaaaagggtttattgaaaagttattgcttgatagacacaatcatttatccagcggttttatctttgttgatttttctttcccgaatcttcgacgatttaccgatttgcaatgggctgacagtctggcagacagtggcatgcatattgtcctgatttctgacagaagtttaactccgctggccaattactggattttgaaaagcaataaaatacaagggattatttattccgatgacgatgatattgtgcaacagcaaaagatgcaccgcttgtttaccggtcggctcgccaacagtaaacgtggacgaacgcttaactatacggaatttatattactgaagcgctttgtatcaggaataagtattcagcagattgtaaatattgacaatattgatattaagaaactttatgtgcataagctgcggcttgaaaataagctagggcatagcattcataaaataatatcaaatattttatagatccgtttccatttttattatttccatattattgcgatgtggaagacgctttacgccataatgcaggaggcagaatgccaactccccaaaattactcattcatcgccatagcggtatcagcagcattagcctctatggtatttccctcccaggcggcctgggttgacgttgatagtctgccatccagtgggctggtcagtcagttgccgccggaattacaggctattattcccgctcaggccagtaccggtttcaccaaagtcgggaccatgcccaactacgtttatcagtggaacaccggcaccatcccggtttatggcaatggcctcacgcttaatgggccgggcgcggaggcgtttgaacacactgtcacggttattcaaaacagcgggacgggaagtccgggcgtgatttttggcaacgacctgaccattcggacgcagtcggcgaatgccgcgaataatggtagagacgtcgatggcatccgtactcacggcgcgaatactccggataacccggtatttattattaccggtgaccgtacccgcatctacgtggatggtcaggatggtgacggtattaacgccggatataactcactgggccagggttggaccggatcggccaatatttacgtcggcgacgatctgtatatcaaaacgaccggtagccagggacgtggcattacagccaacgccatgcgggatgcgtcacgtgccaaaaatacgattgtcgtcggcaatcgtgcgcatattgttactaccggcgacagttcggaggggctgcgtaccggacaaagcggttcgttgattcgtctgggtgacgatgcaactatcgaaacatccggcgcatcctcaacggggatttacgcagcatcctcctccagaaccgagcttggcaacaacgctactattacggtgaacggtgccagcgcacacgcggtatatgcaactaacgctaccgttaatttgggagagaatgccactattagcgttaacagcgccagtaaggctgcatcctatagtaaagcccctgccggtttatacgccctctcccgaggcgccattaatctggcaggcggtgcggctattactatggcgggcgataacagtagcgaaagttacgccatcagcacggagactggcggcattgttgacggttcttcaggaggtcgtttcgtcatcgacggtgatattcgtgctgctggcgccaccgctgccagcggtacgctaccgcagcagaacagtacgattaagctcaatatgacggacaactcgcgatgggacggggcgtcgtacatcaccagcgctacggcgggcacaggcgttatctctgtacaaatgagcgatgcgacctggaatatgaccagcagctcaacgctcactgacctgacgctgaatagtggcgcaaccattaacttcagccatgaagatggcgaaccatggcaaacgctcaccatcaatgaagattatgtaggcaacggcggtaagctggtctttaatactgtgctcaacgatgatgattccgaaacggacaggctgcaggttctcggcaatacttcaggcaacacatttgttgcagtaaataatattggaggagccggggcgcaaaccattgaaggtattgaaattgttaacgttgctggcaattccaacggtactttcgaaaaagcaagccgtattgttgccggagcctatgactacaacgtggtgcagaaaggtaaaaactggtatctgaccagctacattgagccggacgaaccgattattcctgatccagtagaccctgttatccctgaccctgtcgttcccgatccggtggaccctgatccagtagacccggttatccctgaccctgtgattcccgatccggtggaccctgatccagtagaccctgagccagtagacccggtcatccctgatccgacaattcctgacatagggcaatctgacacaccgccgataacagaacatcagttccgtccggaagtgggcagctatcttgccaacaactatgcggcaaatacgctgttcatgacgcgtctccatgaccgtctgggtgaaacccagtacaccgacatgctgacgggtgagaagaaggtcaccagcctgtggatgcgtaacgtcggcgcccatactcgcttcaacgatggcagcgggcagctaaaaacccgcatcaacagctatgtgttacaactgggaggcgatctggcacagtggagcactgacggtcttgaccgttggcatattggtgcaatggcaggttatgccaacagccagaaccgcacgctgtcgtccgtgagtgactatcattcccgtggtcaagtcaccggttacagcgtcggcctttacggcacctggtatgctaacaatatcgatcggtctggggcttatgtggatacctggatgctgtacaactggtttgataacaaggtcatgggtcaggatcaggccgctgagaaatataaatccaaaggaattaccgcctcggttgaagccggttacagcttcaggttaggtgaaagcgcgcatcaaagctactggttgcagcccaaagcgcaggtggtatggatgggcgtgcaggctgacgacaatcgcgaagccaatggtaccctcgtcaaggatgataccgccggtaatctgctaacccgcatgggcgtaaaagcctatattaacggccacaatgctattgataacgataaatctcgagagttccagccattcgtggaagcgaactggatccataatacgcagcctgccagcgtgaagatggacgatgtcagcagcgatatgcgtggtacgaagaatattggagaactgaaagtgggtattgaaggacaagttaccccgcgcctgaacgtatggggtaacgtggcgcaacaggtgggtgacacaggttatagtgatacccaaggaatgctggggatgaaatacagtttctgattcaggtaacaacagagccgctgatcttcagcggcttttacccggaaacgctttcatttggctgataggtttcatgaacggctcccaaaaaagcttaatgcgtacagaaaaatatcgggcgtttcccgatggtgaacataaagccacgatggccctgagtcaggatggtgtaactgatacttttccctggatagacataaaaatcgggtaaaaccgtctcgataaccgcatcggacagtgtttcgtcacgcgtgactttgttgatatccgtcgatataaaatgggtgctgtctttattttcactccatacataggaaacatcacggcggatcacgccgctcattttattatcgacgtaatatgttccgctgatggaaaccaccccagtgcgttttttcagcgaatacataaaatccagcgtcaggttagcctgagtgttgttataaaacacaatcacaggcgccgtacatttctctggatcccggttcttttccgtatacaaatgaaaaagatgtccaagccctacacccagacacagtagcgtcaggcaggctaacatcagtgcctttttacccatgtgtcaccccgcggaaaaaaagcgtcacgcagcctgtatcaccgcgcgttttataaggttgctgacaaatcaatgccgtaaccgctggggtgcgactgctggaagggaaatagacccatgggtatttctgacaatccataccggtttttagaatcattgacttatagcttgcaaagcggctgccgctttcgatatcttcattccgcgagaaaaaatgacagccctgagttgtttcaaccagcgtgtagcgatcgtaaaaatccttatcgggaacggtttgccagcttatagtgccaagcaaaataccgacagcaaatgtcccggtcatccaaagtacaggtacataatgtttaaaccaacgccctgacatacgcggtggcgtctcaccctttttttctattgcctgagcgaagtctttgcggatggtcatgaggctcacacctggctcaatctgaaagcctctacgcggaaccgtgattatcagcgtatcttcattttcgccaacggtacgtaatccgcggcgaataatggagatattctgataaagcgtatttgccgacaccaccatgccgtcttcttcccacactttttgaaagaatgtttgttgtgagacgacggagggggcgttttccagcagaaggcgcaagcagcggctggcgggcgttgtcagaataatgttgagatctggcctcgataatgaagccaggcgattcatttctggattaaattcaatattatcgttaattatccataacatcgcattgttaccatgccaaaacataacgtagttggagagggttaatagacaccactgagtatagtctgatgctgtggctgcgtagcaggacatggattgtcccctgcacataccgatcatatagaagagcgagaggcataagacattaacaggtaagcgtagacaccgcttttctcattatagcagactcaggggtgaaagtacgtttggttttcttgttcgttaagtctcctgttttgtattgaggtgagaatatcacctttaatcaagtggccaaatttactgtgccactacgctttaatatcttatatataaatcatgagaaaaaatatcctgataatctaccccacatgaaagacaaggttttattcaatgtgttcctataatggcttgtaatatcccaaaaagcagcactcgttatatagggatagtttccaatttattaagagttacagtagccatacttaataaaagcacgcttcccacttaatatttaagctgtgctttatgttatttaaatataaataagttaatccttaaccaacatatttcaaatttataccaaataattttaaaactatctatcagaaacaatttgtaggggcatagtttgttttttcaatcaataatcctctctgacatgtaaaatagaaacatttattcataatatgaatattgttgtgataacaaattcgcgtgaaagtaaatcgactgaaggtgatgccgatgaatattccttcagaaagaactcaacaggttaatccagaatcggcaacggattactgtcatcagcttaaaaacggaaatcgccccggcgattaatgactttaacactgatagtgactatcagtgaaaggcaacaacaaggaatgaattatgtctacacccgcgaattttaacggtcaacgccctgccattgatgctaacgacgcagtaatgctgctgattgatcaccaaagtggcctgtttcagaccgtcggcgacatgccgatgccggaattacgcgcgcgcgccgcggcgctggctaagatcgccaccttatgcaatatgccggtcattactaccgcatccgtaccacagggaccgaatggtccgctgattccggaaatccatgcgaatgcgccccacgcgcaatatgtcgcgcgtaaaggggaaattaatgcctgggataatgccgattttgtacaagcggtaaaagcgacaggccgtaaaacgctgatcatcgctggcactattaccagtgtctgtatggcttttccagccatcagcgccgtcgcggaagggtacaaggtatttgcggtaattgatgcctccggtacgtacagtaaaatggcacaggaaattacgatggcccgcgtggtgcaggcgggcgtagtaccaatggataccgcggcggtagcctctgagctgcaacgtacctggaatcgggaagatgccgcagaatgggcggatgtatataccaaaatattcccggcttatcagctactgattgaaagttataccaaagcgcaggaagtagtaaaaaataatgaactgctggattctcaacgcgcataaataacgccctgaagaggctaaatagccccatttaatggggctattttacttgccattttggacctgggcagtgctcgccaaaacgcgttagcgttttgaacgccgcttgcggcggcccgaagggcgagcgtagcgagtcaaacctcacgtactacgtgtacgctccggtttttgcgcgctgtccgtgtccaaactggctgcgccaataacgcctggtgggataggctcttaatcaaatacgccattaataatcgccgtgaccaccgcggtactgagcgcgatcagcaccagattatccccaacgattttccactcatagcccggataataaggtaattgtcccagcatagacgccggcaccgtttttttagcgattcccggcggtagcggttttcctctcgccagatttttcgcaatccccggaggtaaagactgataacccgtcagccctaaattcactgccagttgcctggcgacagcatagctaatgtccgactcgacgtgatccggtttaccgccatttttacggtgttccgttttttgcccggcatttcctttatgtccgttaccgttattaccctgattagccgcgttattaccatgtccgccgccattaccatttcccggattcgccagcacaggcgtagcgctcagggaaaacgtaatcaacgtcgccaggacggcggttaaaccacgacgattattcatgatattgcccttctgatgtgggataccatgaaaatagcgccccgccataaaaagaacaactacatcgattcttattttaagcggggctcgccaacagcagcttatcgtatccagatagtcagtaaaatcaggatgattgctatcaggacaacctgataaaaaattttgtccaaccctcttttttgcatggcgtcacctcgttagaaaacgatttgccagagggctaaacacaacaccaacaggctaatcagtaaaaatatcagcgcgatgattttatcgggtgagcgattcatctgggcgatcctcaaacattattaaaaccactggccaaagcgtttgatataaaagcgcttcatgccttgcgccaccagacagtagctcaataatgtcgccaccaaccacgggaagtagctcagcggcagcggctccagtccaaccatcgcgcccagaggtgagaatggaatataaatgcctatcgccataatcaagccggtcgtcaataataccggcaacgtcgcccgactttggataaacggtattttctgcgtccttagcatatgcacaaccagtgtctgcgagagcagaccctcaataaaccagccggactgaaagagcgcctgcgcctctacgttattagccgcaaagacgtaccacatcagcgcaaaggttgtgatatcgaaaatagaagacgttgggccaatccatagcataaaacgaccaatatttttcgcgtcccatttccgcggcttacgcaggaactctttatccattttgtcccacggcaacgacaactgcgaaatgtcgtacatcaaattctggatcaacagatgaatcgccagcatcggcagaaacggaataaacgcgctggctaccagtaccgaaaaaacattgccgaaattagagctggcggtcatattcagatatttaatgatattgccaaaggtttcccgccctttgataacgccttcctcaagcaccatgagatctttttccagcagaataatatctgatgactctttagcaatatcggcggcgctatcgacggaaatccccacatccgcatcacgaagcgcgggcgcgtcgttgatcccatccccaagaaaaccaacggtatgaccatttttctgtagcgcttgcaaaatacgcgttttttgtaacggcgtcagccgggcgaatactgcgcgtttctccacctcagacgccagttcggcatctgacatcgcctcaacctgggttccggtcaggatatcgtgcgtatcaatacccacttccagacagatacgcgccgtcacaaccggattatcgccggtgaggactttgaccgccacgccgttatcccgcaacgcggcaatagcttttccggcgctttctttcggcggatcgagaaaagtgagcatcccttcgatggtaagttcggtctcatcctccacacttaatgtcggattgttcccggaaccatccagcttacgtgtcgctatcagcaatacacggaatccctgcgcattgtaatcttcggttttcgccagcagtagctcgcggcgtgtttccgtcagcgccaccacacgatcgccttcgcgaagatgggtggctaccatcatcatctcttcaacggcgcctttgcagatcaggcatctgtctccatgctgcgcatcctccaccaggaccgatacccggcgacgtacaaagtcgaatggcagttcatcgcgtttaatgaagcgcgcttttgtcgatggtgcgattcgaccctcgccaaaacgcagtatggcgcgatccatcacattccgggcgccgctctggctgctactattcagccaggccagcatcaatacccggctgctttttacaccgctcacatccagatgatgctccagaaaaatattgtcctgggttaaggtgccggttttatctgtacacagcacatccatcgcgccgaagttttgaatagcgttcaggcgcttgacgatcactttgcgccgcgacatcgcaatcgcgccttttgccaggttggaactgacaatcatgggcaacatttccggcgtcaaccccaccgcaactgccagcgcgaacagcgaagcctctacccagtctcccttactgaacccattgatcagcaggacaaccggcaccatgatcagcataaagcgtatcaacagccagctcacgctgttgactccgcgatcgaaagccgtctgggtacgcgtacccacaatggatttcgccagcgagccgaaccaggtacggcttcccgtcgcaaccacgaccgcttgcgctctgccgctggttacattggttcccatcagacagatattgcccaaatctagcaggcttttatctttatcaggcaattgctcgctgtctttacctgccacatcagccataacatcgtatttttctacgggtaatgattcaccactaagaattgactgactgataaagagatcgcgcgacgccagcagtcgaacgtcggcgggcaccagatcgcctgcggccagaaaaaccacatcgcccggcaccagttcttcaatgggaatctcttcctgcaccgcgcctatattgcccggcccacgacgcaacaccgtggcggtggtgcgaaccatctttttcagcgcctgtgctgctctgttagtgcgaaactcctgccagaaacgcaataacccgctcaaactgaccatcgtcagaataatcagcacgccagtgagatcggtctcttcgccacggcgtaacgggagccagtaatccgtgatgaaactaacccctgccaatgccatcagaacgtaaataaacgggttattgaatgcctgcagaagctgaatcagcgccggaggaacttgctcatgcgccacttcattgcgcccatacactttcaaccgttcgctggcctcttctatcgtgaggccctgacgatggctgttcagccgcgccagtgtctcctccgggctatgaaaagcttccgcttcgatcggaaatacttttttatgctgcttatcattttctgacgccgggcgattgagtttccggttttcaatgttcatgtcagtcatgatgaatccccaaaattaaggtgtagtgtttcctgcatatcacgcccggggaatagtaaactcacgattagaaggtgaatgccccgggagaattatctatgcataaaaaaggttattgcttactcactattttgagtgggttttattttatcgactcgggaatatccatcattccctccttatacgcctggcgtaatgttgcaattgaataaaaaactattattgactatcaatgctccagtgaattgcggtgatattatcgttatcacctattctggatataatcagctctcgcgttttacgataatcagcatgacccacgagctcggcacgaatttctttatagccctgttcctgagcggggaccgaacctaacccttgtaaacagatcgcggcctcttttacgatattcagtaaccactgacgaaccgcgctctcatcttctttattacaggttactttcaggatataacgtttttctccctcagcggatattgggagttgatttatacgctgcgccgcttcacgcaataaaatattggcgcaaagaataatgatcgtcgccgccagcgcatttttgaactgccctaagccgcataacacgccgatgcccgccgaacaccatagcgttgccgcagtgttcagcccgcgcacattcatcccttcgcgcatgatgacgcccgcccccagaaagccaatcccagagacaatctgcgccgcaattcgcccggggctgtctggcgatgtcgtcatggagctcagaataaaaacggcggcgcctgtcgccaccagcgcattagtgcgtaatcccgccatacgttgacgccattgtctttccgcgccaatcagcgcgcccaacagcatagcggccagtaaatttaaaatataaggaaacattaacatacgttcctccattttttctggaagaataagtacgtgctatatttagcacacgacaaatttctgccctgaggcaattagcgtcgtgttaacggcggaggaaataaagcgtgtttaaacatgaacatgacgattacctcgcgacaatgcgcgtgttgtaacattattgggatgacaatcgtcacaaggggagattgctgcccaccggttcggcaagcagcgcaggaatagcgtgcgttaacttgccagatgatttacgtaaaagtgactgtccaacatattactcctgcatgaatttgcgcttattatagtcagccaatatgttccgtaaagtgcaaaggcgggtttagtgacgttctgtttaagtttgtttgatattttttcttatgacaaaaaaatgacaatattatgtcgataacaagctcgtctgaaatcattaaacaataaattcctgcttaataccggcgatagctctgttatgatgcctgcacgtaaaaaaataaaacaacatgacgaggaaaaaatgggttccaccagaaaagggatgctaaacgtcctgattgccgccgtattgtgggggagttcaggcgtttgcgcgcagtacatcatggagcaaagccgtatgtcgtcacagttcctgacgatgatacgtttgttattcgccgggctgatactggtgaccttctcctttatgcacggcgataagatattttcaattcttaaaaaccgcaaagatgccctgagtctgctgattttctccgtggtgggcgcgctcaccgttcagctaaccttcctgctcacgattgaaaaatccaatgccgccaccgcgacagtgctgcaatttttatcgccgaccattattgtagcgtggtttgcattagcgcgaagaacacgaccaggcattctggtcttaaccgccattcttacatcgcttatcggcacctttttactggtgactcacggcaatccaacatcgctgtcgatctcttcagccgcgctgttctggggtatcgcctccgcatttgccgccgccttttatacgacctggccttccaggctaatcgcccaatacggcacactgccagtggtcggctggagtatgtcctttggcggccttattctgctgcccttctacgctaaagaaggaacgcactttgcggtgagcggcagcctgattctggcctttttctacctggtggtgatcggtacatcgctgacgttcagcctgtatttgaaaggcgcgcaactgattggtggccccaaagccagcattttaagctgcgcggaaccgttaagcagcgccctgctgtcgctactgctgttggggattagttttaccttgccggactggctgggcacgctgctcattctctcgtcagtgattctgatctccctcgattcccgtcgacgcgcgcgggccgcttaacgccgttgataatcacgatgaccgggcggaagagggaaaagtttaatggcgctttgccttaatctcttcgtcagaaagcccggtaatcatcagcaccatctctcgctcgatcccctgttccagcatcgtatgcgcaatacgcaaggcttcctcctgcttaccttgatgtataccttgctgtatgccttgttgcacgccttcacgcttaccttttctgcgccccgattcacgtattctgtctacgatcgtcattaatctctccttgtgttggggaacacggcgcgccacctcgcggataaacttgccaaaacgaggcgtgctgccatgctgtattagcaaataattaaacagcgcttttagctgactgtcattagcgtttcccgtaatcagaagtaccgctaagcgctcgaccaatcccatcaggtcgcgttgacgtatatgcttttgtaccagttccagcatcgcgatacgtcgatgctgcataatctcgttatccggcaccaccgtaatgtctaccagtggaaatgccgtcgcataaagctgacgcgccagcgcaggatcgtcaaactcatccagccagcaaagcgaaaagggatacgggcttttcgcgccatggtaaaacagcatgggaatcaccagcggtaacgttttatggccagcatccagatggcgctgcatcgcggcagtggcgtaacgcattaaccggaacgccatatgcgcgtccggcgtactctgatgctctataacgacatagatataaccgtcgccttcacacgtttttagcgaccaaaggacatcggaataaaacgcgcgtaaatttttctcgataaaactgtccggcgccagtttcaacgtcgtcagatcgcaacgtattcttagcgaatggggaagatgaatattgagaaaatcccgcgcggtatccggatggcgtaaaaacgttttgaataccgcatcatgaggcgtggacgtggggctttttttcatggcgatccgtcacctgaggaataagatgacgccactgtactcgccaaaaatacagacagcattcaggaaaatttacccctgcgaggaggctcgaaagggaatcactgacggctgcaatacgtacatttttgcccagcctgctacgcattatcgcccgatagcgtaacgctaaccgggcctacaaatacacgtcatctgtaggccaggtaaacgcagcgctcttcggcgataaatctcacaccagcgctttgactatctccatcaaccgaatgatgtcttcggggcgcgtattgccggtttgcggatcgataatcgagctgtaaacatgcggcatgacgcgcggcacgcctgcttccaggcaggtttgcaggataataccgaaattatccagtgagataccgccggtcggctcgataagcgtcatgccgtggcgggcagcggttgtcgccagcgcatataattccggtaacgacttttcgccgcccatcgggaaaaacttcgccgcatgtgcgcccatatcctgcatcatgcgtaccgccgcttcacaggaaacgcgggctggcgttccctggctgctgctgacgccggtagaaatcaccacctcgccaggcgttcccgtcgggctgaccagggcgttgatatgcgtttgctcgccgcccgtcgccgccagcgcgcccgccgcgaagccgctgccggtaaaggtctggttgacatgggccgggtgagtatgggcggcaatcatcgccgctttgtagtactgcgccgggtcgcctgcgcccagacccactgagatagacggcacctccgccatccagcgtttcacctccggcacgccctcttctaccgtagcgaactgcgcggaaagtacgccaatgaccgcatggccttcggcggcttcatagatagccttcgcgttggcgatatcctttgccagcacgttaatcgctacccgctgacgataaaaattaatctgctgcatgttctgcaatctccctgagtcgcgccacaatcaatgccatttccccttcggctaccgtgcgtggatcgaggctaaaaaccccctgatgaagctgatatttgcgggcgtaaatcgctatctcgccgccgcgcagctgcgcttcgacgtcctgcgcgttcagccccaattcagatgcgttcacccgcacacgaatacgccagattgcacgcccggcctcatcctgttcgatatcggcataaagtccatggatggcggaaatcgcttccgcgaccggctgtaactgtgctgcggtcacggtcgtctggccctggtggtaattctccagcgcatacaccagcccaaccatgttttccttgccgattttcattgctctggcaatcccctggtgctgcgctttgcaggcggcaatccacgttttcctaccagtgataaagccggaggttggcgcattaaaggctttcgcgccgctatagataaccatatccgcgccgctcgccacccagccgcgcaaatcctcttccgccgcggcatcgacaatcaacggcaggtggttggcctgcgccacctgtacaaaatcgtcaatgctcaacatgcctttctgtacgcaatggtgtgatttcacatacagtagcgcggcggtcttttcgttaatggcgctttccagttgccagcgggtcgccagattgctcgaccccacttccactatgcgcccgccgccaagacgaatggcgctggtgactggcgcgccgtagtccacattatgcccgcgcagcatcactacctcattggccataccgctactgtccggcatcagggcgacgcgcgcccgatcgccgtgggtgatagcggcagcgacggcaatggcaatacccgccgaggcgcacgaggtgatatagctatcttcagcacccgtatagcgcgataccagttcgccggttttttccaccagcgcgtcaatctcgacgaaagcggaagccgcgcgcgcggtggcctgcatgacctccggcgcgacgcttgagacgcccagaatggtcattttgccgcaggcgttaatgacctttttcaaccccagttgttgatagatattcggcgtcatgatttacagcactcccaacaacgaacagactatgctcagtgcgacaatcgacagcaaaatggtggtgtagcgcggccctttttttaccagatagaagtagatggcgaataccgccgccagtggcagtaagcccggcgcgatagagtcgaggatctgctgaaccaccacttcagatcctttcaaggcgctaatttttaacggcgtggtgattttgacgtagctggcggaaagcgcgcccatcatgatcaaacccagcacgttggccccgtagatcagttctttgattcgccccccttgcagcaggccgataatcgaatcacgccccagcgtatatcccttgtggaccataccgtagctgatcgccagggtgatcgccgggtagagaatcagcgggataataccgcccatcgcgctgccatttgccgcgaacggaataaagatcgctatcaacagcggcatcaccgccgcccagataatcgagtcgcccatcccggcaagcggccccatcaggcccgttttaatgccggtgatagacgagtcgttaatcggctcgccgcgcgttttttgttcttccatggcaatagagatgccctgaatcaccgcgccgaaggtctgctcggagttaaagaagttaaggtggcgttttagcgcttctacctgctcctctttttgtgggtaaagttttttgatgatcggcgtcatcgaggcgcagaaaatcaggctttgtaagcgctcataggagctggaaacctcggcgcccagccagtagataaaccaggctttggtgatatctgctttggtcagcgccccgctttcccgcgcgcgctcaaccagttcatgttgcattacgtcactgctcatcatgctgctccttcatttttcgccaggcctttaatcaggaaggcgacacaggtgccgaagatggccatcgccatgatgtcgaccttgaggtacaacaccgcgaagaacccgccgataaaccacggcaacaggctctttttaccgatcaccataatggtgatggcaaagcccagcgccggcagaatgccgcccatgatttcaaaggagtgggttaaccagtgcggcatcagtttaaggaaactttccaccacatcctggccaaagtagttagcggcaaaaaccaccgggaagcgcagcaccagccccagcaatgccgggtaaagaaaggcgcaacgcatgatgcccgccatgtttgccgtttccgcgtgtttatccgccatatgcacccaggcagcattcagcgtgcgcctaagctgatcgagaaacacgccaatcacgccaaacgggattgccagcgcgatcgccaggtttgggtccataccggccttcaccgcgataggaatggagatacaggccgccagcgccgggtccgacggcacgttgccgcccggcgttgaggtcacgcccaaataaacgagctgcatccctgcgccgatgatcatcgcagtctgcatattgccaagcaaaagcccgacaaataccgcgatcaccaccggttgtaacagcatcgcggagaaggtgtagccgaggcgtaaacgggcaaaccagtaatacaaccccatcaggcttgcaaagagtaaggtatccatagtgttatcctatacacttcatccttcaggctgcctctttgttggctgccttcgctcaccccagtcacttactttagtaagctccaggggattcactcagttgccgccttgatgcatccagaatgattttgtgtctattaaagggttagaattttttcaggatatcgtcgagcggctgcggcttatcttccggaatggtctggaaaaatacctgaacgccacggtttttcaggtcgttaagaatgccgacgtctttttcatccagcgtaatattctgaaaaaccgccttgcggtttggcccgccgccgagaccgccaacctgaatgtgggtgacgtcaaagcccagttgtatggcgtcctgcaccgccgccagtgacggaaaaagcaccagcacgttaccgtcgccaagctgattttctttccatgcagcggcaaaactctggttgccgaagcaatccactttgatatttggcggcgccgccatcaggtagatatttttcataaacggatcggcgtccagttcatcactcacaacggctatccggttcgcctgagattgtccgacccacttcgtgacaacctgtccatgaatgagacggctgtcgatgcggcataaaacgatattggccatgatgttttccttagagtgattgttgtagctgacgtacatgggcgaccacatccaggcagctactgcgcccggcctcaactaactcgtccacgcaggcggttagcatcccttgttcgcgcctgtccagcgcctccagcagtagcgacgcattcagtccggcaatcaccgccaccggataatcggcgcttagccgcgccgcgacgttggacgttgtgccgccgacaaaatccgtcaggatcagcgagccttccggcagcgttttcaccacggcctcgacgcgttgataaaactcgcccagcgtatcgacaggcattagcgcgatttccgtcacgcctttaatttcgcccgtgaccatacgcaggctgttgcaaagcggttgtccccagccgccatgcgtcagcagcaggatgtggggcaacggttgtgtggtagtcaaaatggcctcctggcgcaattacatgaggacaccggcatatattgcccggtggcactgcgcttaccgggcctacaggacactcccggtaggccggataaggcgtttacgccgctatccggcataacgcatcatcagaagagcaaaggttgtgccagaatttgtgtcacgcgaggaagaagaaaggtctggcgaggcgcgaagccccgccagtaaaaggattaactatagagcagttcgtagatataaaaatattccgcatccgataaacggatggcgtaggcgtcttcgatcggcagaaaagcggatttgatgacactaaacgcgcgcgcgtccagattcggctgactttccaacgccatctgtaacggttttcggttaatcacaatacgctctaccatacagcagcagtggatcaggaagcgcagtgtcacctggcggcttggtttcagggaaagcgaagacgtcagatggttaaaaacgccctccatctctttcagaatacgctgcgggttaagcacggaaatatggttgatgatactctccatcgttagcgcgctgataaagcgcatggcgctgcgctccatctccagacggcgttcagcgttggacagatcgggcgttaacaggctcaacaccagttccggcccttgttcggagaaaagctcttccagcgaaataaacggaatatccggcagccccggctggaaagtgccgacaatccccgccagccgctcgctggcattcaatgcctgctgaacgcgctccagacttcgtacctcgttataatcaaggatcaccatcctggtgtcctgcgacatcagttcgccaaagctctcctccagcacctttttgattttttccgccgttcccatgccagtaatacaggagatgaccagcactttgccgccgttctcctgctgcggcgtacaaagctggcaggggatatttttactctgcaggagcgccgtcaactgtggtaagtcgctggtttcatagcttaaatccagcccgacttccagcagactggtcagcgtgatgttcggcatgagcaaaacatctatctggaataacttactgatcgtactgccgaaatggatcaatgagccgatgtccaccaacaggataagccgccgatattggcgggtttgaatcatttgggtcagcgtttccagcgtgtcatgcaccgactgttcaaacggcatgtcgatggcgctgaacagctcgcgctccagcacgcggttgacatattgcgcctgactggtggcggtggtcgcgccgtgggcgattaaaataaccccgcagtcggggctggcatcgatacgctgacgataatggcggcactctttcaggaacaggcatagccagaccacttccgtcgccggacactgaatatgcagcagttcgttgattttccgacacagcagcgtggcgttgtcatattcgtctttgcagcgatccaggatcaaactggaagagtaaagctgcgggatcaggccgcgctgcacgtagcctatcagcgccaggaagtgtttacgcagtgggttaaccagattttccggcagcgaaaagcccaacacctgctctacgcagccaatcagcagcgtcacgcgctcttcaatctggtcgccatagcgcggcggatgcgccacgctgtcacggctgtagagaccgtattcaaaaatcgagctgagtttatttttcaggatcgccagcgtctccgccggggggacgttactgttgcgcaaattaacatactcgcgcgtcaggaagctgtaaaagaggtcgctctcttcaatttccgccccggtcgccagcgacgtcttcaatgcgggcagcgtgcgcgcgtctatatttagccgcgctttaccctcaaacagagtatccaccaatagacgctgttccggcgtcgggttaaccgacatttccgccagccgcttatccagctgtagcgtgtcgttatgctcggtcattcccgatgcccacgcctgagcgcagagaaactgaatatcgcttttaagctgaccgatattgccttccaggggtttattcagcaaccagagtaacaacggtttatcaatgctgaccgtgcgttctattttgcggctttcccgctgtaagaaccccacgatcagttcgatctgttcttcaacggagcgctggtgaatgcccggcaaatcaatgcatacctgaatacgccgctggaaagtacgtaacagcgccgacccgaccggctcggtagtggcgcaaatcaggcgtaccgaaattgatcgcggctggctgctcacgccgagcggacggtactcgcctttatccagaatagagaacagcttttcctgcccttcataagacagacggtgcacctcgtccaacagcagataaccaccgtccgcctgctccacgaggcctgttttatgttcattcgcgccggtaaacgccccctgccgatgaccaaacagatgcgaggagagcagttccgggttatgggcgtattccgcgcagttaaagtagaccagcggcgggatagcgccgctcgcctgttcacaggcgaaacggtgcatcagttccgcaaaaaaggttttaccgacgccggacggcccggtaagcagaacgtgtaaaccgtgcggatagagcaccgccgcacggcctttttctaccgcatcgcgcaggctgcgatcgtaaccaatcaggctggtaaacggatcgtcgggcgcgtaatgctcttcatgcggcagcacatccgccaccgaccgcacctcgcgttcagactcttccagctgtcgtcccagcaacgtttccagcgcctggcgatgcagaaaatagaccgggcggccacggcttttgattgccaggccgtcattccataactgattgagatctttgctgacggagttacgcgccagcccaagattgaaacctatcgcctccgccgtaaacgccgtctcctgcgccaaatcggcaagacatagcccgcgcgtcagccgttccagctctcccagtacgatctcaatacgtctcattacactaccgcttacgaaataaaagagtagtcagaacatacactattctgccacgcaagaaagtgaaggcgcagcgagaaaccgccttcccacttttgcctgacttcaacgccaacggatagcacgccccgatgagtgaacgtcgcacggtctacacttactcttgaaaaagtgcaaaccgataaggataccgtttatgaaacgaaaaacgcttctgcttattgccacacttgtcgcgctaccgggcgtcacgtatgccgactctccgtttagctcactccagtcggcgcatgaaaaaaatacgattttaaaggatttgcgcaaaatgtgtacgcccaaaggcgcgctaaccgatgaagcctgggagaaaaaaatcatggcgagcgaggggaaccagcagcatattcgggaggcgatgatcgcgatagagcgcaacaatcagcataactactggcaggctctcggcaaggtggaatgcccggagatgtagcacagcttttccgctttttggtcgcgaaaatgcggactgtaaccggtttctgttcgctaaaagcgcgtattctggagcgaatttacgcgatcaaggagtacgacaatgcgataccgttttcccgataacttctggtggggcagcgcctgctcagcgttgcaaaccgaaggggatagtctgaatggcggtaaaagccagaccacgtgggatgtgtggttcgagcgccagccgggtcgttttcaccagggcgtcggtccagcggaaacctcaacgttctatcgccactggaagcaagacatcgcgctactgaaacagttaaaacataacagttttcgcacctcgctaagctgggcgcggctcattccagacggcgtaggcgaggtgaatccacaagcggtgagcttctacaatcacgtcatcgacgagctactggcgcagggcatcacgccgtttattacgctgttccattttgatatgccgatggtcatgcaggagaaaggcggctgggaaaatcgcgacgtcgtagaggcgtttggtcggtacgcgcaaacgtgttttaccttgtttggcgaccgcgtgaagcactggtttacctttaacgagccgattgtgccggtggaaggcggctatttgtacgacttccactatcccaatgtggtggattttaaacgggcggccaccgtggcgtaccataccgtgctggcgcactcgaccgccgtgcgcgcctggcgcgccgggcgctacgacggtgaaatcggcatagtactgaatctgacgccgtcctacccacgctcgcagcatcccgccgatgtgcaagccgcgcaccatgcggatctgttattcaaccgcagttttcttgacccggtattaaagggagaatacccggcggacttggtggcgctgctgaaaacctatgaccagttgcctgcctgtcagccaggcgaccgtcagcttattgccgacggcaaaatcgatttactggggattaactattatcagccgcgccgcgtgaaatgccgtgatacggcggtgaatccgcaagcgccgtttatgccggagtggttatttgactattacgacatgccggggcgcaagatgaacccttaccgcggctgggaaatttacgcgccaggaatttacgacatcatcaccaacctgcgggataattacggcaatccgcgctgttttatctccgaaaacgggatgggcgttgagaacgagcagcgttttgtgcaagcgggacagattcacgatgattaccggattgactttatttctgagcatcttaaatggctgcataaaggcattagcgagggctgtcactgtcttggctaccacatgtggacctttatcgataactggtcatggctgaacggctataaaaatcgctatggttttgtacaactggatttagccacccaaacgcgcacggtgaaaaaaagcggagaatggtttgccgccaccgcagagcataacggttttgattaagcatttattattgccggatgacgactaacgtcgtatccggcctacaaatggcagcaatatcaactcattggcgtaatacggactttcgccgccacgactaacgccgtcaacagcatcaggccgccggaaagcgccagcggcgaaagcagcccgaaattgtcgagcgcataaccgcccaccgccgcgccacaggtatttgccagttgaatcaccgcgacctggatggaaccggctttttccgcctgatcggcaagagaacgagtgatccacgttgaccatcccaccggcaccagcgcaaacgccagcccccagataatcgctattgccgccgccacggttttgtcgcttccccacacaatgagcgtcagcgcgctcagcgccagtagcagcggcgcaccggccagcgccagttttaccgaacgtttcaggacataggatgagaaagaagtgccaacgaagctggcaataccaaaacttagcaacaccagcgtcagaccatcaacgtcaaagcccgccagattcatatagaccgggcgaatataggtaaagaaagcgaactgcccggcaaaagacataaagatggcgatcatcccggccatcacgccagggcgttgcaacaggctaaacatattctgtttctggtgagaaggttcgcccggcagcgacggcagtgatttcaccacccagatgacgcacagtacgcccatcaccgcagcggcgttaaagacattacgccagccaataataccgcccaaaaagctgcccagcggcgcggcgatcactaacgcgatggagacagcgccaaaaatcaccgacagcgctttcggcacggtacgcgcgggaaccagtcgcatggtcagcgacgccgacatcgcccagaatccgcccagcgccaacccaagacaggcgcggcccagcaatagcagcgtaaagctgttggcaaaggagaccatcagacaagaagccgtcagcaaaacggcgaacagaataacgatataacgcctgtcggtcgcctgaataatctgggtaatgaacaggctggaaaacatcgcgacaaacgccgtaacggtgaccgactgaccggcgacgccctcggagatccccagatcctgcgccatcggcgtcaacagactaacgggcaaaaactcaacggtaatcaggcaggcgacacaaaacgccacggcaaaaacggctgaccagttaggcctggcaaccccatcagcgcggaatttttctgcgatattttcattcattgtggttacctgcgtcgttttagtgcggaaaatccacgcagtgtaacattacaaaatgtgatctgattaacgttttagcaactgacattgttgcgctgcattttgcgaggctggtcgagagttgagaattatcttctctcgctgcgtgtaaaaccaaaaggtaagacatagtgtatcacctggtgctatactttagattacaggatgtcaacctgatgcgaaccttcaaaaccaggtggtttaacagagaagcgaagccccacacgataaaagatgacgagttaagcgaggccatcaacgccgtactgcaaggaaaagcagataatcttggcggcggggtttataaaaaacgtctcaatcaaaatcgcgatcgcgcaatcgtgttggcaaagggaggcgaacattggttttacaccttcctgtatgccaaacaggatatggccaacattagctatcgcgaactcgcgggtttccgtgagttagcaaaacactatgcttgcctgaccgaagatcagataacggcactcattaataacaaagaactggtagaggtgcgccatgtcagcaaaaactaaattcaaaagccctgcctttgaaccgattcatagcgcggcatctggattatttagcgtggatgccattccccaggagacaatgcgcagttttgacacggcctgcttaagcagcatcaaagacctgcagccacttgaaataaaagcgttacgagaaaaactcaacgttagccagccggttttcgctcggtacctgaataccagcgtatcaacggttcaaaagtgggaaagcggcgccaagcgtcccagcgggatgtcactgaaactacttaatgttgtccaaaaacacgggctaaaggtgctggtatgagggttttaccgatggtctgttaaggctattcatacgatcatgagtgcaggaagcctctacaacttcctgcgctgtttgacgggaattgcactatactgactcaccaaagccatcagcaaatgcagattttaattcatccataaaagccagttcatcctgtccatcacaaattaaatcaatcattgtgtttccctttacgccagcccccaaaatactcatcattcctttaatgggaatttctttgtcattattaactagcgttaatgaagactggtattttttgacaattttcgcaagcgtagcggctggccgcgcatgaagccccgtactgttcataacgcgtactttttgtctaatcatatattttccttaagagactttgcggaatgctgagtgatttttattcatcatcttaattttagaataaacatcatcctcaactgcctgttttgcgttcgccatgacacgcgccagattagcctcgttgttattatttacccaagccttaccaacagtagtaataaaggctttgcgcaaatcactcgcaatattcactttggctactttgtaattaacaaagctgcgaagaatatccgcgtcaataccagaacctccatgaataaccaaaggtaccggactgacagacgcgatgcgttgtaatagcgggatatcaatgcgtgggatatcttcaagaccatgtacattaccaattgacactgccagcatgtcgcaccctgtctcctcaacaaagcgctgaaccttctcaggttcagttttgcagtcagcctcgctgacatgatcatcttccttacccagaatagcgcctaattccgcttcgacgggaacaccaaatgatttacagaaatcgacagcttctcgggtaaatgcaatattttcttcgagcggtagcgccgcgccatcaatcattactgaggtaaatccggcccggacagcctgcttaacatcttccagagttttcccatgatccagatgcaggctgacaggaatatccattttatcggcatgtcgcttaactatttcataaatgtaatcgtaacctgaaagctgtgcattagtaggagcaatttgaataaaattgggcaatccggaacgttctattgcattaagaatggaaattgttgtctccaggttcgttgtattaaatgcccccgcaaggacatgtttttcctgaatacaattgagcaggatcctaccattgactaaaggcatattaactccagatatttatgtgagcagtgtaagtaaattatcgaactattgagttatcacagttattcaccaataagcgccccttcttgccgcagtttaaattggtaaaatgacagccattgctgctgatatattttcaactttgcagaacgaaccgcgtcaggaaaatatcgctcagccacaggaacagtcggggggacaacattcggacaggctatcaacaatgctccaagggagacggtttcatcaaaagcaatggcctcaattggacactggaggatgtcagccttcaactggagccagtatgggtttttcaccgcagggccaatgacttttactgtcctgcccgccgggatattaaagcacccgtgacagtgtgcaaactccatcgccaggccaataaagacactctcaagcagagactccggaggaagtgaatccgtcagaccaaaaagcaggccacgagtgtgccgatttttatttggcgaacccgagccccgcaaatgaggaataaataccggcacatgctcgacagaccaggaaggtttgaggtactgctccatgactttttccaggcctgtgcttatttccttatcagttaaacgaaaggtttttttcacccattcaagcgcataaccgccgacaggcagagaagcgaaaagcgtgaaaaattcaccatcggagtaacaaccatttgccagcttattcctgcgagcctgcacatcaagcgttggctgtgtattcagcagtaaaataccctctgtcgtgccggtagaattcagcacatcgcccggttgcatctgtaatgcgcgggcaccgaccatatgatcgtgtccagcgagggtgacttttacctcatgagagaagcccaattcctctctaagcgttgccgtcatccatccggccacttcacctggctttatcaacggagccagtacaccgaacggtatgccgagaatcccggcagcattacgagaccaggtacggcgagcaatgtccagacacaacgttctactggccagggatatttccgtctttttcgcacctgtcattctccacaacaacacttctggtgcatgtaaccagcagatatcttttctttcatgcaaggaatagttatcaagcaaccatctcattttaaatgctgagtaattactgtgaggtggcaatcccgttatagaatacagttcttcagcctctgccttgcttaatgacgagagataagattcaccacgtcgatcataccaggccagcatcggggtaagaatgacgccctccttatccacaaagacgccagactcaccgaaactcgcaatactgatattttttaccggaaacggtactgaagccaccagttcagccattaccagtcgcagtgcctgccacagcgcttcgatatcgaaatctacctcgcctttgtccgacgatattgttggcgtcggaaacttgcggacttccagaactgacacgtcatgacaggaataacagctgactttgcagttagttgtgccaatgtcaatgacaagcgctgcgtggtaatcaggcatagaccgttccttttgtcaggcgaaaaacaccataaataatcagcgcaagcacaggaatcagcccgatagcaataatatttccgttgaatatttcaagcagccagaaacggaaggggttaccgccatcaaggaagcttgatacctgaccacttgacccctcagccattttgaaattgacatctttagccataccggtaataaatggcgcaattttggtcgcaatccacaagtcggcgacaataacaggaattgcggttatcacagcccggaaaatattgccacgacatgccagtacaatcatggaagccatgactgccaggttcgcaaggtctccgagtggcaggactttattgccaggaagaaggaatgcaataaagacagagataggtgtcagaatcagtgctgtagatataatggctgggttacctactgctaccgcgatatccagtccgataaagagatcatcacggccaggatatttggcattcaaatatttcttaatggcttcagacagaggtaataaaccttccatcaaaattcgtaccatacgcggaagaatgaacatgacaccgccaatgctgatccccagcaacaggatatgtttaaagtcatatccggcaatgatgcccaacaagacccccagaatagtacccaccatcataggctcgccgaagattcccatttttttctgaacgttttccggatcaatatgaatacggttaacgcctgggatcttgtcgataattttatcgaacagcaatccaatcggaaagaagacgacagatgacagggtcggaagtgaaataccttccagaccgaagtactttgccactaatggcgctgaccagtccgccagtttgagaaccacgatcgcggcaatagcggctgcggacaaacccaaaacaaaactccctgtgctgtagtaaaccagcgttccagccagggcaaagtgccagtagttccacatgtcgacatcaacagtacgtgtcttattcagggccagcatggcgacattaatcagcatcgtcagcggaatgacaaagggtgcgattggtgagccccaggtaattgcggccaatggtggccagcctaaatcgacaacaggaaggctaataccagttcgctcaaccattgcctgtgcagccgggcctacgttgctggtaagtatgtcaaagatggcataaattccgacaaaccctattccgacaattaacgatgagcgaagtgctttagcgggttttactttgaagaacaatgccaggaaaaaaaggaccagcggcaataaaaccgttgggccaaaccccaggacatattgcacaacggtatagagagtatgtgctatatcattcatatccgacctcttattcagatgtgaccagacctcgcgttagcgcctggataatttatctgttttttatttatgaaatcaggcttggcctttaaggattgaaactattttttcaagaactttatcttcacctactccggtaatgattggcaggccactaacaaccggaatatccagttcataaggaactttcgttgttgatacaaccaaagctgcaccatcggtattgtttggcaatgaggctacattagtttgtgaataattaacatcaagcccattatctttacaatattccattactttttctgccacagccgtggaagtagcaacacccgttgcgcaaacaaatagtatcattttactcatacttcacctctttcagatatgcgtgtgtaaattgactgataaatttcatcatcattcatgaccagtaactgctgcataaaatcctcatcctggatcacatccataatccaacccagtacgttgagctgcttattgctttcacctaaagcaagcataaacaccaccctgacaggtacgggatctggttccccgcccatatcttcgaaattgacgggttctgccagtattccaacactaatggcgttttggcgaacatacttgtgatcagtatgtggaatagcgacgcctacaggctcaaccggtagacccgttggaaaattctgttctcgcgtaatgacgtgatcggcaaaatcagatacaaccataccatcgttaattaacggactggcaagagccttgattatgtcattctgactcacctctttagggaggtgtcgaacataatgacggcgaaaatgaatatcctgcatagattcctctttgctagtcaggcatccaggcgctgtaaaatagtgccaagataatatttattaccttttaaccagacgttaccaaaatcaatggccaatcctctagagaaaaataccaactgttccaaatgcaaaacaggtgcgtcttcaccaatatcaagataatggcctcgctcattaccaattaatttggctgcgtaacggctttcagaaaaacttattttcttatcagataatctttctattgctgaaaataaattctccctggtaaaatctacatcaataataccggggcagagatcaatgttgatacgattttcaatcaacatgactttttcatcgccaatacaacgaaggcgtttaagaaataaaacatcttgtcccggtttgatactcagtttctctgctacaaagcggttagcgggttccagtcgggaggttatgacactggttgtgaagtttatcttctggctggctaaggcttcagcaaaggagagcaaaccttcacccagtgggtaagcaacattttccttctttacgaaagttcctttaccctgcacttgcacaagaacaccttcccggacaagttggtcaaccgcttttttaacggtaccgcgactcacctccagcatatccatgatttgaaactctgaaggtatccggtcatcctcaactaattctccgctataaatactttcccttatccactccacaacctgttgatacagtgggatgtgtgaacttttactcaatgttttcatggtgcgcgcctaaacatttagagttgtctatagacaatcatgtacaacttcgagtttatgataagaaattttgagacaggaggtatggcaaggagtcacagttttagtgttcaaaacaagatcacatttccgtgatatatgtcacggaaatgatgagctataagtctctgacgttttggcgtcgttagcggttattcggtgcgttacttctgtggttcacccttagcaaatacgatggcggctacgctttatttagttaacgatgaatcgcgccacccggccgttaatcgtggctcgccgcccttgccagcctcattcatctcgtcttttgttaacgagatagtgaagagtatcaatgcagccagtggacaccctcttccggctgaaaaaaggcgttatagcgcagttgaaacgcgttgatctcctgcatatcgggttccatttcgcgcaaaaagcccagcgccagccgtacctgtgtatcggtgatcggcgcggctaaacgcgctttttgcagcaaccgatgccaccgctgcaaattctgatcgccgccatcgacaatcaccatttgccagatcagtaacacctgagcggcattttgcaaatgcgactcatcagggcgatgcagatactgtaaaaattcaccgcccgccgttttacccatctgatcaatcatcgattctatcggcactacatcaatattcagacgttcgctcaggcggcgaatcgcccggcgggtatccgatgtcagcacccgaaaccccacaataaacaccaccacaaacgtggccagaatcaaccaaatcatgcgcacatccgtcaccaaacaggatgcccatcataacggtaaatttataactgtcgacgttctggcctgtcaggatgtgatttattaacgcttgtcttcatttacgccagacgccggatgtcctgtctgacgaacgcaaggcataaaaaagcccggcgttaagccgggcaaaacgttaccaaatgcacacatttaagcgatattgacttgctgaatttttttctcacggcggattttgcgctcttccatcacggcgaccatcgccatcaggcagatacagccgatcgcggcggcgtccagcgcggcgaacgtgcccgcccagccggtcagaccaaaaacgggggtgccgtcggcaatcatgcccagacccagcttggcaaagctatcgccgataagataagcgaaggtgcccttgataccgtccgcagcgccgatggcttttttcggtacgaaaccgacagccgccacgccaattaatagctgcggcccaaacaccaggaaaccgagcgcgaacagcgaggccagatagacatactggttgctggcgtgctggtagacgccgagggtggcgatgattaacgccagcgccacacaggctaccagcgcacgacgaccgttcgccaggtcagagagccagccccacagcaacgtgccgaccagcgcgcccacttcaaacaaggtaaagccctgaatcgccacctctttagaaagtttcagctcctggaaggcgtagacggttgaccactggtcgataccaatacgtaccacatacaggaagatattggagaaacacagcagccagatcactttgtttttcaacacatattcaacaaagatctgccacttggtcatttcgttttcttcagtctctttatcctcttcgctgatctcttcgccgaacagttcttcagctttacccagaccgtaagattccggggagtcgctgccgaaacgcagaccgataaagccaacaatcagcgcgataatcgacgggaagataaacatgccgatgacgtgaccgtcgaacaggtagttggcgccgaacagcgccacacctgccgcgcccgcgccgccgaggttgtgggagatattccagaagccgagaaaggtgccgcgtttacgacgcggagtccatttggtgatggtcgagtagctgcacgatccgccggtactctggaagaaaccgctcagggcatagaaagcgatcatcagaaacagactggttgaccccgcgcccatgctggcgctgaagccgagcatacagatagcggagaggatcaacataaacggtagaaactgcttggtatttttaccgtcagcgtagtaggaaaccagcgttttccccacgccataggtgatcgagaagcccaggccaatcatccccagctcggtcatgctcaacccgtaggtagagatcatgtcgttctgcgcgatgttaaagtttttgcggatcaggtacatggtcaggtagccgataaaaaccaccagataggactgcatgaacggcttgaaccacattttacgccgcacatcgagcggcagatccagggtcggcttgcgcacctggtttaagaaggccagcatggattactcctgagctaatttttatacctgcgaatggcaggcattgtaaaaatccacaggaaaagtggcctgcgacagcgtccaggcaaaaccgggaaaatttcttagttttgccccattcagcgcaaaaaggtgaggtgtatcacgcttcgtgggtctcgcgtggggcctgagcgttcagaaatggcaacagcaatagcgcggagatccccgccgcgatggcgatgaccgcaaaaaaaccggtccagtgccagatctccagcactttcgctaacggccagccggaaagcgacgcgccgagataggcgaacaggccgacaaagccggtggccgcgcccgccgcctctttatgcgagcactccgccgccgccatgccaatgagcatctgcgggccgaagacaaagaaaccggtggtgaagaaacaggccgcctgcatcacgtagctggcgaacggcatcagccacagcgaacccacagagagcaaaatcccggcggcgaagattaaattcatcggtccgcggttgccgttgaagagtttgtccgagccccagcccgccaccagcgcaccgataaatccacccagctcaaacatcgatactgccgtgttggccgtgaccaaatctacgcccagcgtctcggacatatacaggttgccccagtcgttgatcgccgcgcgcaccacgtacactaagacataacacaacgaaagcagccagatatagggattcaacagcacatatttagcgaggatttctttgcgacttagccccgcgccctcttgctgttgggcgacctccagcgcatcgtgccgccagtcgcctaccggcggtaaaccaatcgcctgcggacggtcgcgcagccgccagcagaggaccatgcccaccccgatggcaagcaacccggccaccatcattccgacgcgccagccataatgcagggcgacagcggccataacgagagggatcagcgccccgccgacattgtgcgcggtattccataacgcccaccagccgccgcgctcggtacgcgagtaccaggcagtcagcaaacgggcgcaaaccggcgatccaaacccctggaaaaaggcgttcagcgcccatagcagagcaaaggcccacagcgaggtcgagaagccgaacagaatattcactacgccagtcgcaatcagcccgatgcccataaaatagcgagcgttagagcgatcgctaacgatgccggagacaaatttcgacaccccgtaggtgatgtaaaacagcgtcgccagcaggccgatatcgctgcgggtcagaatgccgctggcaaggatttccggcgcggcggcgttaaagcttttacgggtgaaatagaacagcgcgtaacccaaccaaatggtgatcaggatatgccgccgccagtagcgatagcgggcgtcaacctcgtgcttatcggtgatgagcggcgcgttggccggggcttttaaaaacgaaagcattatccttccttaaacgtaacgctggggcaacgagacgctcacccgcgtaccgtgggtacaagagatggttagcgtcccgccgagcgccgacacgcgttcgcgcattccggtcaggccgaagccctgctggtgagagcccggcggcaggccgctgccgtcatcctcaatcaccagcatcagccgctcatcctgctgccagccctggagcgtcaccgcgctggcattggcatgttttacgatgttattcagcccttcctgacagacgcgaaacagcgtcacgcgctgactttcactcagcgccgtttcgtcaattcgccagtcgaggtgactgacaataccgcggctttccagctccatttcgcgcagcagcgaacggatggcctgcgccagcgttaagtcgtctaactggcgcgggcgcaagcgccccagcaggcgacgcaccgcgtcatacacgcccagcgaaagctgctcgataagttgcccgctctgcttcacgccgccgttatccgccgccagtcgttgcacaatgcccgcctgggtacgaatcgcggtgatggtctgcccgatgtcatcgtgcagctcacgcgcaacatcgcgccgcacgctctcttcggtctccagaagacgctccgccagccgatggttgcgcgccagctccttttgcaacgactggttcagctcgcgcagacgctgaatgcccgcgccaagcagtagcccggtcaggctttgcgccaacagcgaaagtaataaatcgacgggatgatcgtgccaggtctggctggcgatcagcgcgatagcgttcatcagtgtggcaatgagcgcgccctgccagccataatgccaggcgagcgcgataatcggcaacgccaggcagaacggcgtaaagcgcgaaagttcagcaggtaaacccagttgcagccacagactgacgataaacagcagcagataccagatcagatgccgcccgcgccagtttaccggctgcgataccagcgatggtcccagcggcagccaggtagtgctggtgagatagtgccagaaaaccaggcagatgggggccagcgtcagaccacccgtgagggtcagcagtagcgcgttccatgcctcttccccctgccccagccagggcagggattgcagtagcgccgcggcggtgagggccgcgccctgaagcaataacgtgcgccagtcgcgctgatggcggtaacgcgaagtcagcgccacgggcagtagcgtcaacacactaccgatcatcaaaagcggcagatgggccaacgcaacttcctgcgccaaccagtacaccagcagccactccgcgcccagcaatactggccagtatccgcgcgggcattgcagcataagtcccaggcgcaggccgaagggaaagagtagcgccgccagctccgggcgctctaccagatgcaggctgatactccacaggcagaaccacgcggcggagaagataaaaaagcaggcaacaacggtgattaaacgggaaaaaaaggtgttcattaccaaccgtcaaacatgcgatgcgccagttcaacgtcattgctgacgcctaatttttccagcagattcgcgcgatggacatgcaccgtttttggcgacagccccagctcggcggcaatctcttttaccgccataccctgggcgagtttttccgccacctgacgctcgcgtttggtcagcggatcttgccgacccgccgccagtttcacggcaatatcgggggtcaaatagcagccgcccgtcgccaccgtatgcaccgcggcgatcagttcatccggactacagcgtttagagagaaaaccgcgcgcgccggcgttcaacgcctgttccaccagcgccgggctatcgtgaaccgagagcacgatcgtcgccatcccttttggcagttggcttagcagctccagtccggaaatatccggcattgagatatcgcagatacatacctgtacgccgcgccccggtaagcctgccaacgcttcgcgcccggaaccaaattcggcgaccacctgcaaatcaggttccagccccagtagctgtgcaaagccggagcggacgataaggtggtcgtcgataagggcaacggtgatcatgggttctgtcctgatggataaaaaaaacgcgcttaccttaacgataagcgcgcggctgttcaagccttgagcggtcagacaatgcctgtcgtgacggtgaacgtccgggtttgctgcggttccagttgaagcaaggttccatttcgctgcgccgcgagaaaaccttcaggccgacaggtcgcgggcagggcaaaggcggcaacctgctgatcgccgttataaagaatccagcgggtcatgtaatttagctccgcgctggcgaaacgtgtcacgaacgtggtgccatccggggcgatcatactgaattccggggtatccgtgtacttgtccagttcatcggcgaagaacacgatttccgggtcgtaaaagtcaggctcgttgagcgttgccagcgaggcttcaccctgcaaaagtcgttgattaaacgccagccactgcgccgtgggtttgacatgcgccggcaccgactcgcgtagcttcagcgcggtatccgggatattctgacggaacgtggcgttcggcacataggcatagttcatgtggcacatgtactgtagcggcatggcgactgaagccaggttagtcactgtcatctgaatatcaaacagcgcgcttgttttacgcattaccaccgcaggttgcgcctgataatgatgaccgaaccccatcacatactcgtagcgcccggtcacgcgcagactgtcgccctctaactccagccaggcgtcgtccatggcagcgcagggcatctcgccgtgcagcggatgtgtatcttctggtgacgggcagccattcgccaatagtccggaatggaaagcaaagcaaccatacgttgccaccacttccgcagccggcttcggctggcggaacatgttgcgcatagtcagatcatgaccgtcaaactgcgcgtcccaaatcatctgccccatccagggcagaatcaccagatgaccgcggctgttttgtattttcagtccttccacgccgctggcgtaacgaaacgccgtaaccgtaaaatcatcattttccagcaagatacgcggctgctcgctaaaaagctcccgccataatgtaatacgtgttgtcatggttgatctcctcaggacgcggcgacttcagccaggttgccgcgcactttgctttcgcgccagaagtaaacgccaacgtaaacaaagcacagcatggaaaccaggaatgagagctgtagcgagtggaacatgtccgccacgtagccctgaatcgcgggaaccaccgccgcgccgacaatcgccatcacgatcaccgcccccgccatttcggtatgctcgttatcgacggtatcgagcgttccggcataaatggtcgcccagcaggggccaaacagaacactgaccagcaccgccacgtataccgcgctaaagctgggcgccagcgccacataggccaggaacagcgcgccgatcacagagtaaaggatcaggactttttccgggttaaagcgtgtcatcagaatgttggcgataaacttgccgataaaaaagcaggcgaagctgtagaccataaaggttgaggcatcgcgctcattgatatcgcctaactccagcgccagacggatagtgaacgaccagaccgccacctgcattcccacatacaggaactgcgccacaataccgcgacggaaacgggcgttgctggcgagatagcgtaacgtatccagcgccgaggggcgtttatgactcgcggtttgcgcgactttacaggtcgggaaacgcgtcagcaggaacagtaccatcaccactaccagaaccataatcatgtacttatagggttccagagtgttttccagcatcagcaccttgaagttgtggacctgctcggcattcatgcccgccatctgtttttccaggctttccccttcggaaaagaccagatatttacccaataaaatgcctgccgccgcgccgatcggataaaaggtctggctgatattcagccgcagcgtggcgtaggctttcggcccgatcatcgaactgtaggtattcgccgccgtttccaggaaactcaggccaatcgcaatggcgaaaatcgccgcgaggaacatggtgtaggtcgccatgtgcgacgccgggaaaaagagcgtacagccgacaatgtatagcgtcaggccgataagtatcgccactttataactggtttttttaatgaccagcgaggccggaatagcaattaaaaaataaccgccataaaaggcgctttgtactaatgccgaagcaaagttgctcagcgaaaatacacttttaaattgcgtaatcagaatatcatttaacgcggctgcgcatccccataatgggaataaacaggataacaaaataaactggaacagaggtgtcttattcagatacccgtcgggcatctgaacgatgtttttatcgttcatagtgctacctttaacagtgcagggtgattgttattcgttcaacgaaagatactcattaaattgctcaatacttggataagaggattgggtgcctttcccggtgacgctgaaagcggcaaagagaacggcttttttcatggcggcttccacatccccgctctggacgtagtaatgcgcgaaacagccgataaaggcatcgcccgcgccgctggtatcgacagcgttcactcgaaacgccggaacatggacttcctggtcacgcgtcatccacagcgcgcctttctcacccatggtgacaataatattgttcagccctttatctaccagcgaacgtgccgctgcgcgaatatggtcataggtatccactggcataccggttaatatttccagctcggtttcattgggtacaaagaaatcgcatttacaggcataagacatatctaattcccgtaatgctggcgcagggtttaataacacttcaatcccgtgtttcttgccaaattctattgcgtgataaaccgtttcaagctgaacttccagttgcagaacaataagctggcatttttttaaatcttccgccgcgcgatcgatatcttccggcgagagaaacttgttagcgcctttgatgatcagaatgctgttgctggagttggcgttgacgaaaatcggcgctacgccgctgctggtacacggtactttttctacatacgtcgtattgatcccccaggattcgagattacgaatggtgttgtcggcaaaaatatcgtcgcccactttggtcaacatcaatacttttgaattgagcttagcggccgccacggcctggttcgccccttttccgccgcagccgattttaaacgccggcgcttccagagtttccccttctttgggcatctggttggtgtaggtgataaggtccaccatgttagagccaataaccgcgatatccattttactccctctcagaaatcgtcacacgacaatgatattaaaataacattatcatgttacttccgtatcatttgtgactatgatcgcgattagaggatcattttgccatttacttcgtgaacaatccctggcggaacatacgcgcaccaaatcatttttattgttacaatttactgaaaattaactatttattgttataaaacgcgaataaacccacttttatttcctgacagccggacgtatagtagtgccacactgtaatgttctcagaaacacataaatgttactgatggaacataacaacatgatttgcggagagggtgaatggagaccaagcaaaaagaacgtatccgacgcttgatggagttactgaaaaagaccgatcgaatccatctgaaagacgccgcgcggatgctggaagtttcggtgatgaccattcgccgcgatctcagccaggatgatgaccctttaccgctgacgctgctcggcggctatatcgtcatggtaaataagcctgcgtcttcaaccaatatgccgctgccggcgaaaaagacgcatcatcgggacgaccttcccgttgcgatcctggccgccggcctggtgcgtgaaaacgatctggttttttttgataacggtccggaaatgccattagttatcagcatgataccggatgatattacctttaccgggatttgctactcgcatcgggtatttatcgcgctgaatgaaaagcctaatgccacggcgattctgtgcggcggcacctatcgggccaagagcgatgccttttatgatgccaataatccttcggcgctggattcgctcaatccgcgcaaagtgtttatttccgccagcggcgtacatgaacattttggcgtgagctggtttaacccggatgatcttgccgccaaacgtaaagcgatggaacgcggtctgcgcaaaattttgctggcgcgtcacgccctgtttgatgaggtcgcgcctgccagcattggtccgctttctgcctttgatgtcctgattagcgatcgcccattaccgacagattatgccgttcactgtcggaatggttccgtcaaagtcatcacgcctgattcggaaagtgaataacttactcaaaaaagacggcaattttattgaacatggtgggatcggactggtttcgtaccaccttcgccacgtcttccagtttatcgatctgactgatcatctgttcaagtcgctgatcgtcattgaccagaagccagatgcggctctgatcgctaccctgaatcggtaaacagagaataccctcaacgttgaaagcgcgtcgggcgaacagcccgcagacgtgggtcatcacgccaggatggttgcgaacggtcagctccagaataacgttatcatgtgattgtttctgcatggcttattcccccaccatctctgtatttgccgcgcccggcggcaccatcggatacactttttcttctgcatcaatgcgcacatggatcaacgccggtccaggacgacgaatgatagcctgcaacgccgcctgcggatcggcttcgttattcaaatcacaggtgtccagaccaaacccggcggcaatctgcataaagttgatgcttcccggataggtcgccgcaaaaacgccctgtttatagaacagactctgttgctgatgtaccagtcccagcgcgtcgttattcatcaggatgattttcacatccaactggttttcactggcggtagccatctcctgaatattcatcatcaaactaccgtcgccggaaaaacacagcaccttgttgcccggattcgccagcgccgcgccaatcgccgcgggcagaccaaaccccatggtgcccagcccgccggaagtcagccactgacgcggacggttgagcggataagcctgcgcggtccacatctgatgctgacctacgtcagtggtaataatcgcgttgtcgtccacacaggcggcgaccgcgttaatcagcccatagtgactaagcgggttattttcctggggaatactgcaagggaattcttgctgcaagtccgccaccaactgatgccatgcttcccgcggctgtgcctcgatatggggaattaactgtgccagtacatcatcgacatccgcctgaatagccacatgcggctgcttaattttgcctaactcggcgcgatcgatatccacatggatgattttggcgttcggacaaaactgctccgttttgccaatcgcccggtcatcaaaacgcgcgcccagaacaatcagtaaatcggcctcttgcagaataaaattggtactgcgcgcgccgtgcatccccagcattcctaacgacagcggatgcgccttaggcagcattcccagcgccattaaggtcattgtcgtcggcagttgcgctttttccgccagttcgcgcacgcgtgtcggcgcattgatcacgccgccgcccagatacagcaccggacgcttcgccgcgttaatcattgcggcggcctcgcggatactctccgcgctaaactccggcgggggtgatttttccgccggcgacggcaacgcatccagctcaattgtcgccgtctgcacatctttaggaacgtctatccacaccgggccgggacgccccgactgcgccagacgaaaagcatcgctcatcacctgaggcaactcattgatatttctgaccagatagttgtgcttggtgatggggatagagataccgtaggtatccacttcctgaaacgcgtcagtaccgatcatggacgccggaacctgcccggtaatacagattaacggaatagaatccaggcgcgcatcggcaatggccgtgaccagattggtcgcgcccggcccgctacaggccatacaaacagcaggtttaccctccgtccgcgccatcccctgcgcaataaaccccgcgccttgttcgtggcgcgccagaatatgacggatttgcgtactttggcttaacgcgtcgtaaacggggaggatcgaaccgccgggaatgccggtgacgatacgaatcccctggcgctccagaaaatgaacaataaattccgcgcccgtaaagcgctgaggtgtagatgttgtgcccgaacttgccatgctccattccttttattctgagccgacgttccgggaaggtgtcttaaacaaaaaaccccgcccggtttgcgccggcggggttttggaatcgtgtgtgttccggaccctacggcgcattgccgacgaccaccaccacacgcacgacgaccactgcgcgagatggcgcagttgttagtagggtcgcgttcagcatggaagggttcattaggggccttgtctgtttgttattaacacgttttatacaagcacagcgctttcagcatgacaacggaaaaattttcatctgcacaaaaatgcgtcagcgatcacatttttctacgaatttacacgctttgagtataggcgtgataagcgtagcgccctccggtaatcgccgggattgatgatcacgcatttcacaatgccggaaaacaaaaaacctcgccgaagcgaggttcttacagcgtaatgcgggtggtagccgcgaagcacactgtgttatgtcaacagcagaagtatacgcgttctgtgcagaacgcgcaatttcggcgcgaattttgatgaatttgagtatggatcagaagctccgttctgtctataaattactgttcatttatacagtacttaactataatgtctttgacacaatgtgttatgcgggggccgcatcgtaaaccggcgcaacgaagtcctggctgaaacgggtggtgccgtcagcgccttaaccccctcgtgagcacactgtgttatgtcaacacgcacactattcctcgcaaaagggatcgcgtgcgcaacagctggcaacaggcagcggaaaggtacgtcggctggcagtgctccttaaccacaggagacgcgtatgagcgtagtggatatcaccattcttatcctgaaactcattgttgcagcactgcaactgcttgatgctgttctgaaataccttaagtaattcagattcaagccgcaccgaaggggagcgggcaaccgctcccctttcaccttatccgctggtctttcgcttcccgggtatgttacgtttttatgacaccctcaacgacgcctgacgctatgaccctttccgttttctgcattttgctgttcgccgcgctgttacatgccagctggaacgccattgtcaaagcgggaaacgataagctctacgccgcgatcggcgtcagcggttccgcggcggtcatggcattgatccttttgcccttctcgccgcagccagcccacgccagtatcccttttttagcggcctctaccgcgctccaggtggtgtataccgtcctggtggcgaaaacctatcaggtctcggacatgagccagacctatcctcttatgcgcggcaccgcgccgctgctggtggcgctcattagcgttctgtttcttggcgacagcctgtcgtcgctggcctgggtcggcatcgcagtgatctgcatggcgatacttgggatggcctgtaatggccgcgccagctctcaacgtggtgtcgtgctggcattaactaacgcctgttttattgccggatatacgctggtggacgggaccggcgtaagactctccgaaacggcgctgggctatacgctatggtcattttttctcaacggcgcctgcctgttaacctgggcgatgattgcgcggcggcgggaagcgtcgcgttatctggcgcaacagtggaaaaaaggcatttttggcgggattggcactatgggatcttatgggctggcgctatgggccatgacccaggcgccgctggcggtggtcgccgcgctgcgtgagacgtcgattttattcggcgcgctgatagcctggctgttgcttaaagagaaagtggccgggctacgtctggtggcggctggcgggattgccctcggggcgattttactccgtctgtcatgatcgcccaatgacagccgcagacgtaacacattctcggcaacatttgttgccgcttttgtttacatatcctgccgttccttcgtctgccattgctggttgctgtctggccttctttttctggtgtgatagattcctctcgcatttatgggaatgcgcagcaagttattcttattttttctttttttgaaaagtaatcagcgaaatgaaaaggcagagaaacgtcaatttgttgttgatgttggtgttactggtggccgtagggcagatggcgcaaaccatttatattcccgccatcgccgatatggcacaagcgctaaacgtccgggaaggcgccgtccagagcgtaatggctgcttacctcctgacctacggcgtctcgcaactgttttacggcccgctttccgaccgggttgggcgccgccccgtaatcctcgtcggcatgtctatttttatggtagcgaccctgttcgccatgaccacgcatagtttgacggtgttgattgccgccagcgccatgcaagggatgggaaccggcgttggcggagtaatggcgagaacgctcccgcgcgatctgtatgaaggaacgcaacttcgtcacgccaatagcctgttaaatatggggattctggtcagcccgctgttagcgccgctgattggcagcctgctggataccctgtggaactggcgcgcgtgttacgctttcctgctggtgctttgcgctggcgtcaccttcagcatggcgcgctggatgccggaaacccgccccgccggcgcgccgcgcacacggctgatcgccagctataaaacgctgtttggtaacggcgcatttaactgttacctgctgatgctaatcggcgggctggctggcattgcggtctttgaagcctgttccggcgtgctgatgggggcagtattaggtctcagcagtatggtggtaagcattctgtttattctgccgattccggcggcgttcttcggcgcctggtttgccggacgcccgaataaacgcttctcaaccctgatgtggcagtcagttatttgctgtctgctggcaggccttatgatgtggattcccggctggtttggcgtgatgaacgtctggacgctactcatccccgctgcgctgtttttcttcggcgccgggatgttatttccactggccaccagcggcgcgatggagccgtttccgttcctcgcaggcaccgctggcgcgctggtcggcgggctgcaaaatattggttccggcgtactggcgtggctttcggcaatgctgccgcaaaccggtcagggcagtctgggattgctgatgacccttatgggattgctgatcctggcgtgctggctgccgctggcgtcacggatatcgcatcaggggcagacggtttaacgtttccctcgcccggcgttttgccgggcgtttcacattccggcgcgatcatcgcattgagcagggactcctgcgccggacgccacgctccttcttcgccgtcataaaactgagtgtccgcgtttatcgcatacggaatatgcgcttttttcagctcgcaggccataaaacgggcaaacgcgaactgtgaagcgaccggcgtcatttttatcgactctcccggcgcccatccgcccacccagcttgcatggccggtcttatgctgccagcgaaccgcagcgttgatccgtgcccgaatcgccgctttttccgccgccgtgcctgacgtccacggatatttaccgccgcttttcaggggtccccacgggaagatgtgccactccgccagtacatagttctggctttgcgccggcagtttaagcgccgacaaatcctccggcgcggcgcgcatgcggggggcaacgaaaatcatccgctgtgggtcaatggcgtgaatcaggcggatggttttgtcatatacgcgattcagcgacgccatattatgattaagtttgtcggcaggctcataaatgagatcgaaccccagaagcggggatgtctgaccaaaatagcgcgcgaccacgctccaccagttgatcagctccttttcatggctggcgctgggatcggttttatacgcatccgcctgataggcaataatgggtatgacgccatagtattcgcaggcctctaccagcttacgcaaatggatgaggcgcgcttccgtcggcgcgcctgccacacgaatacggacatgcgttaacccttttgccttaaaatcccgcacgaccagcggatcaaactcgcggataccccgttccgttcgcgcccagtcaacatccatcccaacgccaagctgctgcgcatagcgcgccgccgtcaaaggcatcggtttcgcatagacgaccgcgctggtcagcatgagagaggcaataagcggtttaaacacgacgccccctaaaatttttaccacggtgatagcacgtatttagcatattcactcccggcaggtgtagcgacaaagcgtaataaatcttcacacctgttcctgcaaccagcgaataaatgcctcgattttcggccactgcctgccaggcagagtggtgacataataatgctgatgacatttcagcctcatgtcaccaaaaggcgcaatcagttcaccgctgtcgagacgcttttgcaccagccgtttacgccccatcgccacgccaatgtggttcatcgcggcaatcaccgctaaatcagaacgatcgaagccaatgccggatgaatccggcaaatttactgcaaaatgctgcgcccaactgtgccactcatcggtgcccgaatcgttactccacgcctgtctgtcgtgtaagagcgtacagtgccgtaggttattcaggttatcctgcaaggcgaaacgacgggcataatccgggctgcaaacgggcaaaatcgcctcatccattaaaaaatggtgcgtgagctgcgccgacggcgcatcgtcaaaatagatagccaggtcaatgccggcacgctgtaggttaacgttatcgttgccggtcagcatagtgagagaaattgacggatagcgacgggtaaagtcccccagcgcaggcaccagccagcactgggcgatagagggacgtgaatacacggtcagcgtgccggacagttcctgatttttgatatcgaggatttcctgattcaacgtatccagcgacgatttcagcgcccagaatacccgtttgccttcatgggtaagctccactttacggtgagagcggacaaatagctggattcccaactcggcttccagttgattgatacgatggcttaccgcactggggcttaacgacagctcatctgccgccagagcaaaggactggtgtctggccgcgacttcaaaagtatagagtttggataactgccagccgttgagtaagcggtttcgggtatcgcgaaggggttccatggcaacctcagtcatcttttaatttcccgaagtgtaaaaaaacgcgctgaaaaaatccgcacatagatgaagtaaaatgaaccatatcgcaaaataaaggcaatattagatggaaatcacatagttgattcaatttacatcatgtgaatggcaaattatatcgtttgtcagggtgtgctgtttttctgtccaataagaacagattaatcacagggtaggtgagatatgcacgctcaaatctgggtagtgagcacgctgctgatcagcatcgtgttaatcgtattgaccatcgtgaagtttaaattccaccccttcctggcgttactgctcgccagtttctttgtcggcgcgatgatgggcatggggccgctggagatggtcacggcgatagaaaacggaataggcggtacgctcggttttctggccgccgttatcggtcttggcaccatcctcggcaaaatgatggaggtttccggcgcggcggaacgcatcgggcttacgctccagcgctgccgctggctctctgctgacgtgatcatggtactggtggggctgatttgcggtatcacgttgttcgtggaagtgggcgtcgtgttgctcatcccactggcgttttctatcgctaaaaagacccatacctcgctgctgaagctggccattccgctgtgtaccgcgctgatggccgtccattgcgtggtaccgccgcatccggctgcgctgtttgtcgcaaataaactgggggcggatatcggctcggtgattgtctacggtctactggtcgggctgatggcatcattggtcggcggtccgctgttcttaaagtttctgggtaatcgtctgccgttcaagcccgtaccgacagagtttgcggatcttgaagtgcgcgccgaaaacaccctgccgtcgctgggcgcaacgctgtttaccgttctgctgccgattggcctgatgctggtgaaaaccgtcgctgaactgaatatggcgaaagacggcacgttgtatacgctgctggagtttatcggtaatccgatcaccgcaatgtttatcgctgtctttgtggcgtattacatactcggtctgcgccagcatatgggtatgggcacactacttacccacaccgaaaacggctttggcgccattgcgaacatcctgctgattatcggcgcgggcggcgcgttcaacgccattctcaaaagtagcgggctggcggacacgctggcggtgatcctctcaaatatgcatatgcacccgattctgctggcatggctggtagcgctgattctgcacgcggcggtcggatctgcgacggtggcgatgatgggcgccaccgcgattgttgcgcccatgctgccgctctatcctgacgtcagcccggagatcattgcgattgccattggttccggcgccattggctgcacgatcgtgaccgattccctgttctggctggtcaagcagtattgcggcgctacgctgaatgaaacgtttaaatactatacgacggccacgtttatcgcatctgtcgttgcactggctggcacattcctgctttcctttatcatctgatcgtaaagagacgtactatggaaaacatacaaaagctcatcgcccggtatcctttggtcgaggatctggtcgccctcaaagaaaccacctggtttaacccgggcgccacctctcttgcacaaggtctaccgtatgtcggcctgacggagcaggacgtaaacgccgcccatgaccgtctggcgcgctttgcgccgtatctggcgaaagcgtttccgcaaaccgccgccgctggcggcatgatcgaatctgacgtggtcgctattccggccatgcaaaaacggctggaaaaagagtatgggcaaacgatcaacggtgaaatgctgttaaaaaaagacagtcacctggcaatctctggttccattaaagcgcgcggcggcatctacgaggtgctaacgcacgcggaaaaactggcgctggaggcgggtctgttaaccaccgacgatgactatagcgtgttgctttcgccggaatttaaacaattcttcagccagtacagtatcgccgtcggttcaaccggcaatctggggctatcgatcggtatcatgagcgcctgcatcggttttaaagtgacggtacatatgtctgccgacgcccgcgcctggaaaaaagcgaagctgcgtagccacggcgtgacggtcgtagaatacgaagatgattacggcgtggcggttgagcagggccgtaaagcagcgcaatccgatccaaactgtttctttatcgacgacgaaaactctcgcacgctatttctgggctatgcggtagcgggccagcgcctgaaagcgcaattcgcgcaacagggacgcgtcgttgacgccagtcacccactgtttgtttatctgccgtgcggcgttggcggcggccctggcggcgtcgcctttggcctgaaactggcgtttggcgacaacgtccactgtttctttgccgaaccgacccattccccctgcatgttactcggcgtttataccggtctgcacgatgccatctcagttcaagatatcggtattgataacctgacggcggctgacggcctggcggtaggtcgcgcttcgggttttgttggtcgggcaatggagcgtctgcttgacggcctctataccttagacgatcaaacaatgtatgacatgctgggctggctggcgcaggaggaaggaattcgactggagccatcagctctggcggggatggccgggccacagcgcatttgcgcctccgtcgcgtatcagcaaaggcatggattcagtcagacgcagctcggcaacgcgacgcatctggtatgggcaaccgggggcggcatggtgccggaagatgaaatggaacaatacctggcaaaaggacgctaatactcactcagtgccggaaagacggcagcgccatccggcacgccatcgcctgatggcgctacgcttatcaggcctgtgacgttaacgcagcatcgccatcaactcctccggcgagcgatgctgcttcagtaaatcccgcatcacccgcatatgcggcgaggagtagttaaaaaaggtctggtagccctcgcaaagctgatttttcccctggctatcccgatgctcagggcatccgccgccgcaaaatcgtaataaagagcacttctgacattcagcgcttagcggcaccttgtccggcgcttcagcgccattcctgccgccgcaccactgctgtagcgtctcatcaaaaaggcgaaccgagatacgctgaatatcttcacgtacccaaatatcaaatacgctatttaaaaaccgcccccagtctgctgaacacaatgaatcctcggtcaacattccgttccggtcatgttccaacaatgggataaaatggacattgcgaatgccgagccgttgtaagttacggtacagttgctgagggcgctggctattctggcgatttacgacgacctgaatctggtcatcactcacgacaatgtcctgacgtcctgtcatataaaattcccgataaatgcaataagttggcgaatatgggtaacagcaaacaggattgcgagcgacaacaccgcgagggagatcaaaaatttgtcacgcacgacatgagtttcggaaaaatcgctatgcgcgacatccatcaaattacgactcagggtataacgccaaagaatcaccgccactatcgccagaacgctgattgacacccagaacaagaaccccgcctgatgccagtggtgcctgacggctaacgccattaacgccccgtatcccagcagcgtgcgaaaccaggccagcgacgtacgctccggttgcagtcccggatcgttctgccgacgggctttacgactatccggcatacagtaccagccccatcactatcaccgcgacaatcatcaaaataacgctgatgatcaacaggctatgggtatagggcaaatcctctttcaggcgcatcgctttttcattacgtaaccagcgtagatagccataaatcgccaggccgcccgcaaacagacacaacaatagcgccagcagttcacggatcaccggcgtggcaaaatccggggcgagctgatcaagaccgacgcctgccgccagaaatcccagcgaggtgcgaatccacgccagaaaggtgcgctcatttgccagtgagaagcgataatccggcgcttctccgaggcgggaaatcttcatgacgactccttttacgttcttatgtattcccgttcgttttcagaataccactcacgttgttgctgatatgcttcacattatcccgcagcaagggaatcttattgcaaaataactgtagttcactggtgatgcgttttggcgcaaccgcgctcattgccgctatttttcatttcagttacgacctttttcaacgccaccgccaggaaaggcattattgccgaattaaaagctgaaaaaccacccgtcgcgacgaaaaaaaaggcgaagaagattgataactaactgaaaaaaattggaattatgctcgttggcattacgctgattagcgcgttcattgaggaaagagataagaagaagagcagaagtgtggccggtgcggcgcgcgttatccagcctggatttaacacagtgcgtaggccggataagcaacgcgccatcaggcgctaacccattccccaaaaaatcaccgccagcagttgtggcgtgataatacgcaggaacatcactaacggatagacggtcgcgtaagagagcgccgccgcgccgctggtggcatgaagattgttggcaaatgccagcgctggcggatcggtcatcgaaccggccagcatcccgcacagcgtcagatagttcattttggcaaaaatccgcgccagcaaaccgacggtaatcagcggaatagcggtgatgaaaataccatagccaatccagcttaatccttcgccctgcgtcagcgtatcgacaaaatcgccgccggatttcagcccaacgaccgccagaaacaaaacgatgcctaactcacgcagcgcgaggttggcgctcggcggcataaaccagtacagcttaccgatgctgccgatacgccccaaaattagcgccatgatcagcggcccgccggccagccccagttttaacgcgaccgggaatcccggcacaaacaacgggattgacccaagcagaacccctaatccgatgccgataaacaccggcagcatctgcacctgctggagtttttgctgcgcgttgccgaccacattggctaccgcatcaatcgaggctggacgccccaccagattgagaatgtcgccaaactgcaggctagcgtcactactggcgaccagctcaacgcccgcgcggttaaggcgggagataaccacgtcataacgctctttaaagtgcaaatcgcggatacgtttgccgagcactttttcgttggtgacgaccacacgctcgacgcgtaaatccgtgccacgcgtcgacaacgaggtgtccacttccttgccgatcaccagttgcgcgttatgcaggtcggtagattggccgacgaggtgcagcaggtcgcctgcctggataatcgtccccggcgacggcaccatcagcgtgtcgtcgcgtttcaggcgtgagcaaatgattttatcgctgttcaggatcggcacatcctggatagccatattattgaggttcggattctcgacacggatattcattgtctgaattaatgaatggccgttagcgagagaggattcgtgcttctgcgcctccgcctcgacgttaacgcgaaaaatcagccgcatcagccacatggtgagcaaaataccgcagatgccaaacggatacgccatcgcatagctcatccccatctgatccaccagatccactggcgttcccagatcgcgcaggatttgctgacccgcccctaacgcaggcgtattggtgactgcgccggagaaaatccccagcaccaccggcagcggaatagcgaaaattttatgcagaatcgcggtgaccaacccgcccataatcacaatcagaacagcaaacagattgagacgcagcccggaaacgcgcagcgaggcgaaaaaccccggccccacctgtatgccgatggtataaacaaaaaggatcaggccgaattcctggataaagtgcagcatatcgccactcagcgtcaccccagcctgatcgacgaagtggccgacgataataccgccgaacagaacgccgccaataccaaagccgacaccgcgcactttaatgttgccgatccataaaccgacaaccgccaccaacgccagaacgctgaccgtcaatgcgatatcactcatcttttcttccctgtgagtaacatttcaatttatagggattatgactgaaccgttaaggcatatatacagcatggcgcacattctcatgttagaaaaccgcccagacgtcctgacttcggcagcgtcttaccctttttcgtggcataaaaaaagccccgccatctctggcggggcaaggcaaggagctcattagctatttaatgcggagcgttcgttaatggcgatacgctgcggcgcaatggtttccggctcgttgcgggttaaatcaatatgcagcaggccgttggtaaacgtcgcgccggaaacttccatattctcagccagcgtaaagctcaggctaaaaggctgcatgaccaggccctgatgtaaccatttgggctcgttttccggctgttccggcgtacctttcaccgtcaggcgcgtgccttccagttgaatatccagatcttcctgacggaaaccggctaacgctaaggtaatgcgataatggttatcgtcgcttttttcgatgttatagggcgggaagctctggctttcgccgctgttttgcagcgcattggccagcttgtcaaaaccgatccattgacgcagcagtggggataaatcgtagttacgcataatcatttctccttctaagaagcgagtttttaccttcacactttacgtgcgaatatgctccctgacggcgagcatgggatgacaggccgcgcaacgcgacccgacggaatcagttaatttcgatacggcgcggtttgttcgcttccggaatcacgcgctccagttcgatatacagcagcccgttgaccaggtttgcgccgcgaacgtgaatgttctccgctaactggaacttacgttcaaagttacgctcggcaatgccctgatacaggtaagtacgttctttctgctcgtccgcatgagcgccttttaccaccagtaaattatcctgggcagtaatctccagttcgctttccgcgaaaccggcaacggcaatggcgatgcggtagtggttttcgtctaccagctcaacgttgtacggagggtagccgccattactttggctttggttattttcaagcaggttaaacagacgatcaaaaccaatggcagaacggtacagcggggataaatcaaagttacgcataatcataaactcctgaaatcagcgagaatgtcagaccttccatcatggacaggccaggattgccagaacacccatcaggcgtgcccttctattcactacgtcttataaatgggtctgaatacgtacttttcaagtattttaatccggcttttttttgcagtttattggctattgcatagactggttgggacagcactgattgttaaagtgcgattaccgccacagtgccacgtactggtgatgttatttttagcaacggatcgctataactcatcatgcaaataacgacaaccaacagatgaatgagtgatgataaaaaacgtgtggttaacgctgataatatggaatgggatgcttttattaagcggttgttcaagcgtcatgtcgcacaccggcggtaaagagggtacttatcctggcacgcgcgccagcgctacgatgatcggtaacgatgagacaaactggggcaccaaatcgttggccatcctggatatgccatttaccgccgtgatggatacgatccttctgccgtgggacatcttccgcaaagacagttcggtaagatcgcgcgtagagaaaagcgaggaggagacgaaaatgaccaatgccgtcatccccccggcgaagatgcctcctccctgatttatcgcccggtttccgtcacccatagctgacggaaccctttcacctcttccatccatgcgacgtgtcgcccatccggtgaaaaaacgacggcgtccgcagacggcgggttgtcgtgcctggcggttaagaagtcgatcctcccactttgtgcgtcgcagcaggcaatccggttttccagcaccagtcccagccatttacccgacggatgccagttaaacgctgactgtacgccggtcgcatgatgcgttaactgccggggctcgcctccctgcggcgatatcagccacagttgcgctacgccgttatcgtcccgcatcaaaaaggcgatcgccgtcgcctgcggattactgcggacccagtggcgtggttcgttagtgagtccaggataaacacgctggtgagtaaaggtaagacgccgctgaactacgcccaacggcggcgatggcatcgttgattcggttcccgtcagcggcgtgtcgcctgcctgtttccagccgttttcatgacacggtaaatcgacaataaacagctccgggacttttttgcccgtcagcgacagcgtatcgccaataaaggcgatctggcggttgcccacccagccctcttcataggcgcggttaatgtcatcgctgccaggtctcggcgcaggcgtcgtgcggctaaccagtacgcaccagtagctaccgctgtattcgcgcggatgctgaaccggtaccgttaccggcccatacggcacggccacgccgacattacgtagatccagcgccggatctcgctcatgcagaacgtggtcattataggtaaaactcaccagctcgccgttcgggctaaacacatggacgtgactgccgccgcgcagcgcgccgggagtatacggcgcagtaatatccatcgcatcgaggttagtcacgccccccggcgttgcaataacgccccggcggtggtggaaatcgtaatgccacgtctcatcagggttttcagggccatgaataaacacatagtgattgtcggcaggatgcaccgtcaccacaccgacatgcgcgccctgcacagcgcgataaatcacctccacgtcgccggtatgcacattgacacgctcaatggtcttgcccgtaaatgacgcgcctgaaggccgtacatcaaagaccagccactggctgtcaggtgtccaggtattggtgttggtaagctggtgatggcgcggcgtaaaagtgatttgtttcatgggatgtcctgataagagacgatgctcgtcatcatactgcacacgggcttcactttcaggctttagcgtatcgttgggatagccaggcccgatggcgccacgccaccgggccgtcagggcattatttctcctgcgccagccggatactgcgctctatcaccgcccgccgggcgtcacccgccggcagcagcttcagcatcatctcccaggccgccaccgcctcgccaaagcgctgctgctcaaaggcgttaaacgcatacaggcttaacacccggatatccgtgtggtcgcggctcaccagccggcgcagcagctccccgccgcggcggttatcctccgggtcggacgagcgcgtcagcgcctccgcgtagcccagcgccgcatcgcggtttttcgggtccagacggtaagcgtttgcataggccccggtggcggtaccggcattacccagtaccataccggtgcgccccagcatgagccagccctcaacattgccggcatcattctgcaggcgggtgcgcagccccagcgccagccgcgccatctcctcctcattcagcggctgcgcctgcgggtccagcgcccgcgccagcagcccgggcgtctgcgccgttgcctgctgccaggccctgacctgcggatagctgccggtcagggcgtagctgccggcgccgaccgccagcgcaatgacggcccccggcacgtaaacgccccacccggcgcgcgcgccgcaaaccggggtgtccgccggcagcggctcccggcgcaggcgcacccgccggcgcgtgcgggcgacgattatccacccgcccgccacgatggcggccagcggcagcacccacagcagcaccgtcagcggggtcagcggcgggtcgtaggtgacaaagttgccgtagcgcgccaccatgtaatcgatgatttcctggcggctcttcccctcctgcatcaggtcatacaccctgcggcgcatgtcggtggctatcatcgcgttcgagtccgcaatgctgttgttctggcatttcgggcagcgcagctgctccgtgagctggcggaactgctgctcctgcgcttcatctttaaacggcatcacgtcggtggtcgcccgcgctgacccggcgataaccagcaccagcatcagcatcaccatgcccggtaacagtctcattgcgccgcctcccggctgtatctgtcccacagcggtttcagttcactttcccatacccgggcattcaaatcgcccgcatggcggtagcggataatccccctgccgtcgatgaggaaggtttccggcgcgccgtacacgcccaggtccagccccagcatcccgtcgctgtccgataaactcagcgcatacgggttgcccagttcctttaaccaggccaccgccttcgcccggtcgtccttatagttcagccccaccacccggataccctgcgcagaaagctggttcaggtactgatgctcggcgcggcaggtcgggcaccaggtggcccagacgttaagcagcaccggtttcccctgcgtcagcacctccgcctgatagtactgacccggcgtctccagtgattccaggcggaacgccggcaccggctttccggtcagcgccgattcgagattcgtcgggtcatccccctgcgcgttgcgcgccagctgccacagcagcgccgcggcaatcagcagaaaaatcagcagcggtaataacagtacgttgcgtttcatccggcctccggcaatggtttacggcggcggtagcgcgggtccgccaggcacagcagcccgcccagcgccatcagcagtcccccggcccatatccagcggacaaacggtttgtagtacaggcgcacggcccacgcgccgttgtccagctcctccccgagcgcggcgtacaggtcgcgggtcagcccgccgtcaatcgccgcctcggtcatcaccatccggctggtgttgtagagccgtttctccgcgtgcagcaccgcctccggctcgccgtggcgcgtcaccccgatgagggccaccccgccgcggtagttgggcccggtgatgtcccgcacctcccggaaggtgaagcggtagtcgtgaatggtcacgctgtcgcccgcccgcatccgcacgtcacgctccacgctgtaattctggctgaaggcgatgccggtaatcgtcaccgccagcccgaggtgcgccgccaccattccccagtagctgagagaggttttcgtgccgcgggacacgcgctgtacggcttcggccaccgccagcaccgcaatccagcaggccatcgccatccccaccgccgtcatggcgatgattttatcttccagcagccatggcaaaagtaccgacagcaccagggtggagaccagggcggtgagcagcagcgtcctgatgttacgcggccggtcccggccccagcgcaccagcggccccacccccagcagcagggcaaaggggaccatcagccaggtgaacatggtgttaaagaacggctcccccaccgaaatgctgcccagccccagctgtttgtgcaccagcggcagcagggtgcccagcagcaccaccagcatggcggccatcagcaggacgttgttgccgagcagcagcgactcgcgcgaccacagcgcgttgttcacccgcgaacgcaccctgtgcccgcgcacggcgaacagcagcagcgagccgccggtgaccagcaccataaaggcgaggataaacatcccgcgcgccgggtcggaggcgaaggcgtgcaccgacaccagcaccccggagcgcaccaggaaggtgcccagcaggcacagcgagaaggcgcagatggacagcagcagcgtccacgccttaaagccggcgcgctgttcggtgaccgccagcgagtgcagcagggcggtgcccgccagccacggcataaaggaggcgttctccaccgggtcccagaaccaccagccgccccagcccagctcgtagtaggcccacgccgagccgagcacgatgcccagcgtcaggaacacccacgccgccagcgtccacgggcgggcaaaacgggtgaacgcgctgtccagacgcccgctcagcagcgcggcgatggcgaaggcgaaggccaccgagaagccgacatagcccatgtacagcagcggcgggtggaaaatcagccccgggtcctgcagcagcgggttcaggtcgcgcccctccaccggaaaggccggcagcgtgcgggcgaacgggccggaggtgaacaggatgaacgccagaaaaccggcgcagaccatccccatcaccgccagcacccgggcgacgatatccgccggcacctgccggctgaacaccgccaccgccagggtccagccgctcatcagcagcacccacagcagcagcgagccctcgtgcgccccccaggtggcggccacccggtaccacaccggcagctgcgtgttcgagttgccggcgacataggccacggtgaagtcgttaaccacaaaggcgtgcaccagcacgaaaaacgcgcccgccacgcagataaacagcagccaggcgaacaccccggccgacgccatcatccgcgcgtcaccgcgcgccacgccccacagcgggtaaacggacagcagcagcgccacgccgagcgccaggcacagcagcgcgtggccgtattcaggcatcatgatgaggtgtccttatcagcgcgttgcgggcggcggtggttttcctgcatcgccttttccacttccggcggggtgtagttctcgtcatgtttggccagcacctcgtgcgccaggacgtggttgcccttctccagggtgccctgcaccaccaccccctgcccctcgcggaacaggtccggcagtatcccctcatagctcaccgtcaccgacccttcggcgtcgtagagactgaagttcaccttcagcgagtccgggtcgcgcctgacactgccgggcatcaccatcccgccgacgcgcaggcgctggcccgccgccggcagctgctgcgtctcgcgcttgccgtagaggatttcgccgggggtatagaacaggtcgatattcgcgcgcagcgcgtacaggaccagggcggtggtcagccccaggcccgccagcaccgcgcagaccacccatagccggtttttacgtcgcaggttcacgcggcctcctgttgcgcctgtgcggcacgcatccgcgcctcgcgcgcccgctgctgcgccacgccgcgcagaatggcccggcgctgcagcaccgtgtgcagcgccagcagcgccagcggcgccacggtcatcgccaccgccagccagacaaaaaaggcgtacccgcccatggcgaaaaaatcgctccacgatgaaaatgccggactcaccggtgcccccttttcagtatcagttcgctcacccacgggcggcgtttttccatcagtaaaatcaggttgcgcatccgcatcagcgaaagcgtcataaagagcagcaggtagccggcgatggcccagcgcagcggcgagcgcatcgccgggtcgatactctgctgcatccgcgtcgagccctggtgcagggtgttccaccactcgacggaatagtggataaccggcaggttcaccacgccgaccagcaccagaatgcccgccgcgcgcccggccattttacggtcgtcaaaggcgtgccacagggcgatgaccccggcgtagagaaacagcagcaccagctccgaggtcaggcgcgcgtcccacacccaccaggtgccccacatcggtttgccccacgccgcgccggtgaccagcgcgatgaaggtgtacaccgcccccaccggcgccatcgccgcgacggcaaggctggccattttcatctgccagaccagcccggtgaacgccgccaccgccatcgccgcatagatacccatcgaccagatggccgccgggacatgcaggtacataatgcggtagccctccccctgctggtagtccgccggggcgaaaccaaagccccggacccagcccgtggccagcacaatgatgccggccgccgccagccacggcacgagcctgccgcaaatctgatacagccggggcggcgccgccagctgatgaagggttttccacatagtcgtcacctgacctcctgaaaccagtaaaatgtccgtcgcgccggggcgctactgcacgctgaggcgcagcgccgccgcggtggcgaacgggcttaacgtcgcgctgcccgccagcagcgctcccagcaccgccagatagccgtcagcgggtaaatgcatcgatgccgcgtccatcgccgcggcggcgaaaatcagcaccgggacactcagcggcagcaccagaatgcccagcaggacgccgccgcgccgcagcccggccgtcagcgcaacgcccggcgcggcgagaaaccccagcgccggcgtgccgagcagcagcgtcagcgccatgattttccagccgtacacgtccatccccagcagcagcgccaccagcggggagagcataatcagcggcaggccggtcaccgcccagtgggccagcaccttcgccagcaccaccgccggcagcggcaccggcagcagcatcagctgctccaggctgccgtcctgcaggtcgtcgcgaaacagccgctccagcgccagcagcgaggccagcagcgccgccacctggatgatgcccggcgcgatacgcgccagcagctgcggctgcggcccgacgcttaacggaaacagggtgatgaccatcaggaagaaccacagcgggccggcgatgtccgcgccgtggcggaacgccacgcgcagttcgagacagaagacacgccacatcacagcccggcccccccgccggtcagcgccaggcggcggacggtgtccgcggcccccggcagcggctggtgggtggtgagaatgaccatcccgccctgcgccgtgtgcgccgccatccgccgggtgaggcgcgccacgccgttaacgtcaatggcggtgaacggttcgtcgagcacccacagcgcggcgcgggtcagccacaggcgggccagcgccacccggcgctgctgcccggccgagagctgagcgaccggcacgtcctcaaatcccgccagcccggcctgcgccagcgcctccgggagacgcgcgccgtcgccggggtggaagaagtgcaggttctcccgcgccgtcaggcgggttttgatccccggctggtgccctatccacagcagactgcgatggaagctgtcgcgcacgcggcgcaggggttcgccctgccagtacacctccccgccgtccgggcgcgccagcccggtcagcaggcgcagcagggtggtttttccggcgccgttgccgccggtgacctgcacccactccccggcctccacggtgaacgacagcccgcgaaacagcgtcctctcgtcccgctcgcagtacagatctctggcttcaagcatcattgtcattgcgcatattcaggttgatatggcgtataaacaccggtcaggctttccaggaaggcgacgatatcgtcaatatcgttttgcggcagatcggtgccaacctgataacgcagcatcagttttaccgctccatccagcgtcggtacgtcgccccgatggaaataaggcgctgttaacgcgacgttgcgtaagcccgggactttttgccgtaatttatcgcgaacctctttggtgacgttcatacgaccaatatccgctgcggtaatttcgccaaaattaaagtctcgctttaatcccaatggttcaaaagagcgcccgcctaaaatgataccgccgtgacaggttgcacatttattctctttaaataattgataaccgtgtttctgttgcgcggtcagcgcattttcatctccacgtagccatttatcaaaggcggaatccggcgttatcaacgttttttcgaattcggcgatcgcatcagtaatattttccccggtaaatccttgcggataaaccgcctggaaatcttttttcaggacaggatctttatcaagcttgctaataatttcatcccaggatttagaggccatttcaataggatttaacggtggtcctcctgcttgctcctgcagggttgcagcacgaccatcccaaaattgttcgatattaaatacggagttgaataccgtcggcgcatttattggtcctaccgcaccgccaacgccaattgaggtttttctgccatcgacaccgcccgcatttaacgcgtgacaatgcgcacaggatattgtgctgtcgccggataaacgttcatcatgataaagccggaaacctaagtcgacttttttcgcatcgacgggaatattgcgcggaataggctgaacgggttcattccggtgcgccgggtcggtatcggcgctggcatagttgcgctcacgctgatcggctatccagttcaggatgtcagtacgctctttatcgctgacgccccccgcccagtgcagcgcgacatagcgggttggcggcatagtctgatgttgcataacccattcaattttattcagttcgctttgcggcaccggcgtatccgcaatcagggcggcccgtaccgcctccaggttaaacgacttgtagccgagctggatatcgtaatccattagctgctttgccaccggaaaagaggaataaaaaggcaattcagcggaaggcgtatgacaataatcacatcctttctccctgaaataacccagtattttattattttcacccacaaccgaggcctgcacatcgctttttttactgcgctgtttgtcgtaataccatacatacccggacaaacctaaataacataacagcccaacggtgataactgttgtcgcatagagggtaatttttttcatatcactatccttatggggtattgcggcatgattaattaaattttatttttttactcatgaggcccgtcaatactaaatacaaacccatcatggatattgattggtatcaataattacaattggctaaacctatagatatgataacccccgactatcgtaagatttattttgcgatgtccgtcacagggtttattcagcagcaacaatggataaatcctcttttccgtcatcaaaacgaacgatagccaacaataattgacttaacgcagcataaaagccatagggatcatgcttaaggcaattatttgtaaattccggaagccattccagtaatgacgacaatgttttctggcgtaatttattcattctccgttgttggaacgattcacccaatgaaaaatgtaaatggctgagtaattccagataaatcgccaggtggtcggtcggctctttaaaatcgtcgttgacttccatcccggcttcaagcaataaatgtttaatcatgccgggttcctgctgcgggtattgcgaggcgtagggcaaggccgattttttatccgtcatcaggaacaatccgcaaaaatctgcggccagctccagctgcgcatcctggcgcaggctaagcgcggcaattttttgttcgagtaacgccaccgacgccgccagcgcaggctgacgctttaacagcgccagccagtccgcgatctccgcggactgtaattgtattaacccttcatcatccacttcccggaaaaagagtaacgccagccatgcatatacgcaggcgtactgttcctgagcaagcgctggctgcttaatcatgcggattcccctgcgatgcgggtacatattcacactgcgcgaccatctcgaccggaccgttaaacgccgtgacgttatccatagggccggtatatttttcaatttccaccagcgtcgtatgcgcgctggtcgcctgcgcaagctgtgatgtaccgatatccagcgttaatacgttagggttgccgtacttacacaacgcgttgagatcgccgcctttatcaggatcgtaccaggcgccttcatgaattcgcgccacgcccggcgcatagcgatcggaaactaccgctcccgccagtacctgcccgcgtgcattgaatacccgcacgatgtcaccgttgcggatcccgcgcgcgctggcatcctgtgggttaataaagaccggctccttgccgccaacggcatattgctgacgcagcgtttccgactcgcacagttgggaatgcagacggaaatcagggtggacggattgtaagtgcagcggccagcgctgcgatcccggcccgccatgcgagcgttcgattttttcgaaccacatgggatggccctgacaatcgtcgtattgcatgtcggcgatggttttggagtaaatctcgatcaaaccgcttggcgtgcccaacggctccaggtccggatcttcacggaaagcctgatggcgtacaaacatctgcggatgatcaaactcgatgtactcctgttgattccagaacacctcgaaaatcggtaagtggataccgcgaccttttccctgctggctcccttcctgccagatgcgtttcagccagcccatttcatcaagaccttccgtgaatgccgcttcacggttaaagcgtcggcagagatcgcggaaaatatcaaagtcgttacgcgcttcaaactgcggcgacaccacctgtttcatggcgataatgccgcggttagagtggttgccgaactgatcgaggtcgttacgctcaaattgggtggtagccggcaaaacgatatccgcaaagcggcaggtcgacgtccactggttatcaatggcgatgaccgtttccagcttgcgccagccttcaattatgcggttaatttgttggtgtcggtggaacgggttggtcccggcgaacacgcacatcttcagcggcggtaatttaaccgatttgccgttccagttaatgatcttgcccggttcaagaatggcatccataaaacgcgcaataggaatggtgctgctgtagcctttgtaatccgtgctgtcgtgcactggcggaacggtcgtcgaaccggaaaagccgcttaaaatgatccctttacgaccaggcgtcccggcgccgttatagtgccagccaaaaccaaagccgccgcccggtaaaccaatctgtcccagcattgccgccagcacgacgaccatccatgaccactgttcgccatgctgcatacgttgtacgcaccagccagcgatgatttgcgttctgtcgcccgccatctgccgcgccaacgcgcggatggtgtcggcgtcaataccgcacagtttttccgcccaggcggcatctttgggctgtccatctttctcgcccagcaaataggggaggaactggtcaaaaccgacgcagtagttatcgaggaaatttttatcgtacagtttctcgctgtacagggtatgcgccagcgccagttgtaacgggacatccgtctgcgggttaatggcgatatgtttgaccttatcgcgccccagataatcgtgcgtggaggtgacgaccgggtcgatgctgatgaccgagatagcgccgctggcaaccttctcttttaattgttcatagtactgatagacatcgtgatccgggcaccaccagtttgcctgctggtttttcaccatatcagaaccccatagcacaatcgttttactgttctgtaaaaccagaggccatgacgtttgctgctcgtacacttccattgaacccaccacgcgcggcagaatcacctgcgccgcgccggtcgaatagtcccctcccgtgctaacgctattgccatgtagcgcaatcgcgcgcgccagcatcccggaggcgttatggaacatgccggtagattgccaaccgctcgccgtcagtagcgcgctcggcccgtaggttttttgcacccgctccagttcctgatagaacagatccagcgcttcatcccaggagacgcgcacaaaacgattatcgccgcgctgcgaggtgtcgctttgatgacctttgcgcatccagtcgacgcgcaccatcggatagcgaatacgcgccgcgttgtggacgtgatcgggcaggccggcgatcattttggacgggtatttatcctgttcaaacggttttgccgccacaaatcgaccgtcaaccaccgtggcgcgaatcgccccccagtgagaaccggtaaggataccctctttcgtcgcggcgcctggcgcaacggcatccgctgcgcgggcgctacggggcgtcagtagtgacggccccagcattcctgccaccgtcaagccgccaagctgcgccagaaaacgtcgacgagagacgtgtaacgagtccttatttttcattgtgttctcccttatcgctgtgcggcgtgttggtggtatcagacgcattcatctggagatatttcaacaaggtacgttcttcacgcttatccagactggtgaaaccgatcatgccgttgagcgtgccgatccagccgttagcgtcaaagtgcgctttgtccggcgcgccgtgacactgattacaggtgccgttatagagggagtcggcataggcccaaatcggtttaatgtcatttaccatgtcgcctttttgcatccacgcagttgcctgtaatttgctccactgagtattggtcgccgcgacggtggtctcttccagcgttttcacatgctgttgcacatcgccgcgaatcgaggcgacaaaaatacgtttaccgggcaactgcgtcagcacgcgctggcgaccgtccgtctccgtccagccttcgatttgcacttgcagccagtcaccgtcccgtttaaggactttcacttcagaagcaggtaacagcgaacctgccggttctttatcgcctttagcggcgtaaatcggcttgatatccagcgaatagagcgtatcgccgtcattatgcgtactggcgctggcgcgcagttcatcaaactgtttgcggaaaccgctgctcatatccggtagctggtgggcaatccctttatggcagtcgatgcaggattgattttctttcgcggcgattttcatttgccgcgccgcttccgggttctgtttcgcgtgatccatcgcatcgtagttatggcaggaacgacaggtcgcggagttattctctttcatgcgcgcccattcacgctcggcaagctcggcgcgtttggcttcaaatttttccggggtatcaatcgagtgggcgataaatgtctggtaaagatcgttgctggcttccagcttacgtttcaccatgcctggaatatcaggggggatatggcaatcgtggcattccgcgcgtacgccggaagcgttctggaaatgtacggactgtttatattcctgatacaccggctgcatactatggcagctgacgcaaaactctgtcgtactggtcagtttgataccgacgtgaggtaacacgatcagcgcaacgccgatcacaatcccgacaatgaccagcgccagtatcgaccaacgggcgcttggcctgagtagcgctctccagagttttcgcataatagcccctgtaattatatggtttaatgcgcagatcttattccgcaaatatgaacagcgtcactggtcaggatgaacgggatacggcaatatatgaacagatatgaacagaaagagaccgcgcgcaggatgtcacatcacattgttattgttgaggatgaacctgttactcaggccagattacaggcctattttgagcaggaggggtatcgcgtttcggtgaccgacagcggcgcgggcctgcgtgacatcatggagcatgagcacgtttcgctgatcctgctggatatcaacctccccgatgaaaacgggttgatgctgaccagggcgctacgcgaacgttccacggtgggcattattctggtgacggggcgttgcgaccaaatcgaccgcatcgtcgggctggagatgggcgcggacgactacgtcaccaagccgctggaactgcgcgagctggtagtgcgggtaaaaaatcttttgtggcgtatcgatctggcccgccccacgccgcaaaatgccagtgaaaactgctatatgttttccggctactgcctgaacgtgatgaatcacacgctggagcacaacggtgaagccattaagcttacgcgcgcggagtacgagctactgctggcctttgtgaccaacccaggcaaagtgctgcatcgcgaacgtctgctgcgaatgctttccgcccgccgcgtagagactccggatctccgcacgattgatgtcctggttcgccgcttacgtcataaaattacgccggaactgctggtcacacagcatggcgaaggctactttttagcctcggaggtgtattgatacagatagacgggccgaaatcccggaggcgatagcgaacggcgaacgcgcgcgctgtcggcgttgttatgcgtcaaaataagcaccggcgggctgatattttcaggcaccggttgcccctgtaagaccttaatcgactgcgttatcgctaattctccctgccaggccatctgatcgctgagcgccatcaggatatggccgcgttttaaaccgcgataaacctgatgcgtcagataaaatgagacgatcgtgagcggagtcgtcaaattacgcccttcgcccatcgccgcctccgccgctatcgccgacccggcgaccacattggcgtccggatggcgttccagcatttcctggagtaagtttcgctgcacttcaatgtcgttatcgccccaggcgatatccacaatgttgatggcgctgcctttaattgcctgacgaaaacccgccaccatctcctgactgccgccggcttcttccggccccgggaagagtaaaacgttaagcgcttttcctttgctccactgcaccaggaaacgtcccggcagataacccatctgaaaccacggcagaccgacgtgagttgccacgctggcgtcgcgtatcacgttcgccacttcaataaccggcacattaccggcataccgttccagttccgggaaacgaatggtactgctgccaagcagaatagcgtcggcgccccactcccggcactgcatcatttgctgttgttgcgtcgccagttgccgatagccattcgcttccagcacttttaaatcaacgccatacaatttggccgctttttgcatcccgtagttgacggacaaccagtaagaatctttcaggctggggtataatgcgcacagtttccagggtttactcgcattgactgacgtttgccgccagggaatcgcccgatcggcgcgcgtccagtgtagcagtccggtttcggctgacgccgtttctatattcgagacgatgattatcaaaaaaaagaacgaaataagcgcgcgcatgatagccccaccagcaacaaggttttatcctaatggtttttccggcggcaactcaacccatttcacccgcggcgcataaatgtcaacgccttcactgacccgcagattatggctggccttcgccctgatggcggcgctcaccctgctcagcaccgtgatcggctggataagcctgcgcgtcattagtcaggtggagcaaaccaatacgcaagcgctgctccccacgatgaatatggccaggcagttaagcgaagccagcgcttacgagctcttttccgcgcaaaatctgaccaatgccgacagtgagggcgtttggctggcgcaggggaagatgctgaaagcgcaaagccttaaaattaaccatcttttgcaggcattaagcgagcaggggtttaatacctcggccatcgcccggcaagaaaaagagattgcacaaacgcttgggcaacagggaacgctggtcggtgaaattctcacgctgcgcgcacagcaacagcagttaagccgccagattgcggaggcggcggaaagcattgccgcccaggctcacggtcaggccaataatgcagcgacatctgcaggcgccacccaggccggtatttacgatcttatcgaaagcggtaaaggggatcaggctgaacgcgcgcttgaccgactgattgatatcgaccttgagtatgtgaatcagatgaatgagttgcgggtcaatgccctgcggtttaagcagctcattgtgaccttaaaagacgcgcaagggctgagcgatgccgaagacaccgatgaaaaacttaatcagttggttaaaattttatcccgccgccagcagcgtatagaagatcctaccgttcgcgcccaaatcgccgacgcgctggagacaataaaccagtacaccacactggttaccctgtttcgtaaggaaaacgccatccgcgaccagcttcaaacgcttatggccaataacctctttcagtttacccgcttcagtacggaagtgtcgcagttggtgaacgccatcgaaaaacgaaacgaggctgggttagcgcgtcttacacacgccagtcagcgtgggcaaatagggttagtgatcttaggcatcctggcgctgtgctcattaagttttattctttggcgagtggtttaccgctccgtatcccgcccgctggcgcaacaaacgcaggccttacagcggctactggagggcgatattgactcgccatttccggaggcggctggcgtcagcgaactggataccatcagccgtctgatggaagcgtttcgcgccaacgtgcgcaaattgaaccgccatcgtgaggatttggcggaacaggtgcgatcgcaaacggcggaacttcatgcgctggtgctggaacaccggcaggcgcgcgccgaagcggaaaaggccaacgaggcgaaatcgacgttccttgccgccatgagccatgaaattcgcacgccgctttacggcattctcggtacggtacaattgctggccgataaaccgctcatgacaaactaccgcgacgatttacaggccattaatgattcaggcgaatcgctactggcgattcttaacgatattcttgattactcggcgattgaagtaggcggcaccaacgtttccattagcgaggaaccgtttgaaccgcgacaattgttgaatagcgcgctgcatttaatgcacagccgcgttcaggtggcgctcatcaccgactttagcgagcaactcccctcaacgctacaaggcgatccgcgccggatacgtcaaattgtgattaatcttttaagtaatgcggcgaaatttaccgatcgcggcagcatagtgctgcgcacgttttgcgacgatcagagctggtttattgaggttgaagataccggatgcggtattcctgaagcgaagctgacggctattttcaaaccgtttgtgcaggcgacaggacgccggggcgggacgggcctggggctggctatcagcgccagcctggcagaggcgatgggcgggacgctaaccgtcaccagtacgcttcatgttggcagttgttttcgtttacaactgccggtttgccactccaaacccgcaagtaaaagtgcgttcagggaaccgataaatcttaacggactacgcttgttgctgattgaagataatatgctgacgcagcgtattaccgctgaaatgctcacgggcaaaggggtgaaggtctcacttgctgaaagcgcgaatgacgcgctacgctgtttagccgaaggcgagtcctttgatgtcgcgctggtggattttgatttgccggattatgacggcttaaccctggcgcagcagttgatgagcctgtatcccgccatgaaacgcattggttttagcgcacatgtgatagacgataatcttcgtcagcgtaccgccggtcttttctgcgggattattcaaaagcccgttccccgcgaagagctttaccgcatgatagcgcactatttacagggcaaatctcacaacgcgcgggcgatgttgaatgaacatcagcttgccggcgatatggcgtctgtcggcccggaaaaactccggcaatgggtcgcgttattcaaagacagcgcgctgcctttagtcgaggagatcgaggcggcgcgcgccatgaatgacgacgttaacattaagcggctggcgcataaattaaaaagcggctgcgccagcctggggatgacgcaggcaaccgaagcctgtcgggaactggagttgcaaccgcttagcgatatagatattaaaactatcgtgacgcagggagtgacggcgctcgacgcatggatagccggtcatccttcgccataatgacttccggctcgccacggccaacttatccgacgcgtttcacatcgcccactaacaggatgtaagacagcgcgcccagcagggccacaacggagatatagaccagcgccggagcaaaaccgtagctttgcgccagataaccaatcactaacggtacgctaatcccgcctaacccaccgataaagttaaacataccgccggtaaggccaatcaaccgcatcggcgcaagggaagagattaacgaccaggtaatggacgcaaatccgttgccgaagaaagctatcgccatcaacgccataatccacaacggatcgttagtgtagttagcgcccataatgcatgtggagatgagcaaaccgcaaataatcggcgttttgcgcgccacgcccagcgagaagccttttttcaccagtttatccgccagccagccggagagcagtacgccaaaaaaggcagccaggaacggtacggtcgtcataaagcccgcttttagcgcggtaatgcctttttcctgggtcagataattagggaaccaggtcagaaagaaccatagcgtagagtttacggcgaactgaccgaggtagacgcccaccagcttacgatggaacaccagtttccagtcggctttcgtcagcggctggcgggcctcttttttcgctggcgcatcgccatccaccagaccaccgccatcgcgaatatactccaactccgcctggctaaggcttttcgtcaaacgcggcggttgataaaccttaaaccagaccaatgaccagataatcccgataccgccggtgacgataaagacccagtgccagctcagcatttcctgaatccagatcagcagcggcgtaaggaatgccagtccgacgaactgtccggaggtgtagaacccgactgcggatgcgcgctcatgctccggaaaccagctagtgaccatccggttatttgccggaaaggccggcgcctcgaaaatcccggtaatagcgcgcaggccgataagcgacaatagtcccgtcgcaaacccctgcaatagcgttgcgactgaccagccgaagatagcgataaaataggtcagccgggacccaatacggtcgagaaaccagccgccggggatctggcataacgtatagagccaggcaaaagcggagaagacatagcccatttccgctttggtaatgccgaattctttttgaatatgcatggaagctacggcaaggttggcgcgatcgacgtagcaaatcaccacggtaataaagatcatcaccagcgtcagatagcggcgacgccccggctgtgctgctgtaactgaaatatccatcgtcatctgtctccagattctgggcatagcgaggccgctcaccatgccctgtaaattacagagggtgtgtttttatatttaaattgggttgcccggagggcgacgtttgttgagcctacagcgtggcgatcaccactcggctaccgatccgtcagcgtgccgccacaacggattacgccagtccggcgcgcttttgctaagttcaatcaccctggcctcgtcaatgtctacgccaagacccggtttggttaagggtttaaagaagccgccgtccatgctgaagtcttctttatttttcacaaagtcgagcagctccgcgcccttgttatagtgaatgcccatactctgttcctggaataccgcgttgcgcgaaacaaaatcgatatgcaggcaggcagccagggcgattggacccagcgggcaatgcggcgccagcgccacatcatatgcttccgccattccggcgattttatagcattcggtaatgccgcccgcgtgggataaatccggctgtagaatcgccagcccacccgcgtccagcacgcgtttaaattcaaaacgcgagaacatacgttcgcctgcggcaatcggaatatgcgtttgcgctgccaggcgcggataatattccgcctgttccgccagcaccggctcttcaataaacagcggacgatagggttccagttctttaatcagcaccttcgccatcggcgcgctaacgcgaccgtggaaatcgagcccaaactcaatttcactgccgaaagcttcgcggatttgcgccacggtattgaccgccgcatccaccgcacgggagttatcaatcacgcccatctcttcacagccgttcagcttgaaggtgtcaaaaccaataccgcgcaatttttcaataccgtcaatgacgtctgccggacgatcgccgcccacccagctataggccttgattttgtcgcgcaccaggccgcccatgagctgccagaccggcgcattcaacaccttgcctttgatatcccacaatgcctggtcaataccggcgatggcgctcatcataatcgggccgccgcgataaaaaccggcccggtacattacctgccacaggtcgttgatacgcgccggatctttccctatcaggtagtcggcaaactcatgtactgccgcctctacagtacgtgcccgaccttcaatgaccggctctccccagccaaccacgccttcatccgtttcgattttcaggaacatccaacgtggaggtaaacggtacgtggtgatgtgagttattttcatttcactgcctctcgatacgcattaacaaatgccgcagcctgctgcgcggtgcgttcaacggattgcccggcgcgatagagatcgctacccaatcccgcgcccacacagcctgctttaatccattgcgctaggttttccggcgtcacgccgccgacggcaaatagcggaacatccggcggaagtaccgctttcagcgcgctgatgtagcccggaccaaacgccgacgacgggaaaatttttaacgcctgtgcgcctgcatccagcgcagaaaaggcttccgttgccgtggcgcagcccggacacacggtcatgccatagctcaccgcccggcggatcacctccggttggatattcggcgtgacgatcagcttgcagcccatcccggcaagctggtctacctgttccggtttcagtacggtaccagcgccaataagcgccctgccgccatacgccttcaccacggaagaaatgcttttttcccactgtggggagttaagcggaatttctatagcgtcaaatcccgcatccaccaccgcgccaacgtgcgccagggcatcatcgggcgtaataccgcgtaagatagcgatgagagggagattagtttgccactgcatgagcgatgctccttattccagcctgaaatgccatatcgccatccacggttgaaacatcacgcccaatagcactaaacgcctgttggtaacgtgagatcagcgcgggtccagcgacgagagtgatagcctgttgcgccgcgaaggattcgctcatgctggcgacttccgcgccaatcaacaggccggagaggaagtcgctgacctgctcacgcgcaagatgtcccaacacgtgcgaggcgcgaacctcaaaaagagaaggcaggacggcaggagaattaagaccgcgctccagccccgcggcataggcgtcgccagaaacttcctgttccggcaaaccagccccgaccagcgagtgacgcagcaacaagtgatggagttcgcctgtcatcacagtacgaaaatcatgaatttgttgcgtatcagtctgtacccatttgcaatgtgtgccgggcatgacatagacagaagaaggagaaagttcgcaggcgccaagcagttgcgtctcttcgccgcgcatcacgttgtggttatcctcgcgtgagacacacaatccggggatgatccagatgttgtcgccaacggcggttaactgttcgccaatagcggagaacagggcgggaaccggcagataaggcgcattttgccagcctacgttactgccgatcatgcccgccattaccacgggggtggcgctgtcgcgccagtgtgttgtgacttctgctaacaccgcgtcaggagatttaccgttcaggcgtgtaacgcctgcttctgattgcctgctctccaggcatttgtcgccctggtaaagccaggcgcgcagattggtcgatccccagtcaattgcgatgtagcgagctgtcatgtgatttcctttaaccttcgtgtcgagctggcgatcatggttaatgccgcctgctctgccgcatcgccatcctgatgccgtatcgcatcgaatagcgccttatgttcctggagcgttttcggcatgttggccgcatcgcccatccaggtccgttcaaataccgctcgctgtagcgagctgatcgctacatttaactgttgcagcaccgggttatgcaccgactgcaacactgcttcgtgatagcgaatatccgcctcgttaaacgcttcccggtcctggttattggcaatcatgtcgtttagcgccgactcaatttcagccagatcgcttgatgttgcccgttccgccgcccagcgtgctattgctggctccaccaggtttcgtatttcgctcatcgcgctgataagcctcgggtcgtagtcgttttccagcacccattgcagcacgtcggtatcgagataattccactggttacgcggtgcgataaacgcgccgcgataacgcttcatttcaattagccgcttcgccataagcgagcgaaacacttcgcgaatgatgttgcgcgacgtttcaaactcctcgcacagatccgcttccgctggcagcgccgaaccgggtacgtatttaccgctgacaatctgtttgcccagcgtgataacgatgcgatcggttttattgagagtcatagagagtccttgtgctcgatgtgaactctcttactttaccgcgatagctgaattacgccgcaattttgtagtactagcgtgatatcaaccgtcgttatcatgccattaatgtagtacaacacaattatgttgtactacaatttagatcacaaaaacgacaattggttatgggaacgttataagacgtaaacgaaagacataaaaaaacccgcagcaagtgcgggtcgttaagcgagtatttgcccgatggcgactatgccttatcgggcggggaaatggccggatgagtgatcggggttcagcacaaatttttcaatcgcccaggcaacaccatcttcaaggttcgatttagtcacaaagttagccacctctttgaccgacggaatggcgttgtccattgccacgcccataccggcgtattcgatcatcgcaatgtcgttttcctgatcgccaatcgccatcacctcctctggcttaatacccagcgcctcgaccagtgattttacgccagtgcctttattaacccgtttatcgaggatttcaaggaaatacggcgcacttttcagcacggtgtacttttccttcacctctgccggtatacgcgcaatcgcccggtcgagaacggcaggctcatcgatcatcataactttcaggaactgggtgttcgggtccatcttctccgcttcacaaaataccagcggaatggtcgccacatacgattcatgcaccgtgtagtagctgatatcgcggttagcggtataaagcgtatttcggtctaatgcgtggaagtgagaacccacctcacgggacagtttttccaggtaacggtagtcatcatagctgagcgccgtttgcgcaaccgtactgccgtcccctgctttctgcaccagcgccccgttataggtgatgcaataatcaccgggctgttccatgtgaagttctttcaggtaactgtgcacacccgcatacggacggcctgtggtcagcaccacgtttacccctttttcacgcgcagcggcaatcgcgtttttaaccgccggagaaatggtgtgatcgggcagcagaagggtgccatccatgtcgatagcaatgagtttaatagccatgaaatccccgcattaaatgagtcctgactcatgctaacgcgattccgctcaaaaaacagtaaagaatccgagagaaagggggataagattcacaaacgggattccccttttcaggccgtattctctcctcctgatgtattagataacctcattaatcaaacagaaaataccgtttttctaaaagaatgcgtattgctactttggacatcatcacttagagcctaatgggattggttcttaatcagtaaaaatcaacaaaaacttatattttaaaataaccttatccgatgagaaggagatcgctaatgtcgatggcccttaccgcccccccaaccaggaaaagatttttaatcgttgcctgtctgtttattggaatatttattgcttatctcgatcgcgttaatgtttcggtattagccgcgaatgaacccttcttagcctatatgggtattgaaggcatgcccttgcaaatcggcatgatgatgaccgtctttctggccgcttatggtatcgctaacgttgtattatcaccgcttggtgattatctcggccccagaaaagcgatgatgctttgtattctgatctggactatcgctttaatgattggcggagtcgctacatcattcgctctaattattatttgccgtatattactgggcatcggagagggattttattatccactgcaaagcgtatttattaaaaactggttcccgaagcaggaacgcggcagagcaaacgcggcgtggatcgtcggccagtcagtcgctcccgccattgcgatgccttttttcacctggtggataggcacccacggctggcgctccaacttctttttatgcgccgctcttgggttaatcccactctggctactttggcgatatgttgctgataaaccagaacaacataaaagtatcagcgagcaggaactggcttatatcaaagccgggcaggaaacggaaagcgcaggcagcagcgaaagttttatgttgcgggtcaaaccggtgattaccaactacagctattggctgctggtgctgtggtatctgtgtctgcaatgtttatattggggaatgattacctggctgccgacctatctaaaatcagccagagggttcagttgggcggaaatgggctggctggcgtcgcttccctttgtcctgtcgatatttgccaaagcggccgcaggcgtcttcgtcgataaaataggacgcagcgcccccatattaatggtattaatgtttttcgctggcgtcagtatctatttcggcaccataaccgaacataaatatatgtcggcggtactcctctcctttgctgttgctttctgtacgatgggtacgcccgttgcctggacgttattacagggaatgataccaggaaaatccatatccgccgccagcggcgtaatgaacggcgtcgccaacggactctcttcattatctcctgtatttatcggcttatttatttctatcactggaacttataccggcggcttactatgcctggtttttatcagcgctatcgccgtggtatcggcattaatcttaacgattaaaaaatattaattacgaggagtaaatgatgaaaattaccagcgttgatattattgatgtggcgaacgattttgcgtccgccaccagcaaatggcgtccggtggtggtaaaaattaataccgatgagggcatttccggttttggcgaagttgggctggcttacggcgtcggcgcttctgcgggcatcggaatggcgaaggacctgtcggccattatcatcggcatggacccgatgaataacgaagctatctgggaaaaaatgctcaaaaaaaccttctgggggcagggcggcggcggcatcttttccgctgcgatgagcggcatcgatatcgcgctgtgggatatcaaaggcaaagcgtggggcgtgccgctgtataaaatgcttggcggcaaaagtcgcgagaaaataagaacctacgccagtcagctacagtttggttggggggacggcagcgataaagatatgctgaccgagccggagcagtatgcacaggcggcgctgaccgccgtcagcgaaggctatgacgcaataaaagtggataccgtcgcaatggatcgccacggcaactggaaccagcaaaacctcaacgggcctctcaccgataaaatcctgcgtctgggctacgaccgtatggccgccattcgcgatgcagtcggcccggacgtggatatcatcgccgaaatgcatgcctttacggataccacctcggcgattcagtttggccgcatgatcgaagaactgggcatcttctactacgaagagccggtcatgccgttgaaccccgcgcagatgaagcaggttgccgataaggtcaatattccgctggcggctggcgaacgcatttactggcgctggggataccgtcctttcctggaaaacggcagcctgagcgtgatccagcccgatatttgtacctgcggcggcatcaccgaagtgaagaaaatctgcgatatggcgcatgtttatgacaaaacggtgcaaatccacgtttgcggcgggccgatttccacagcggtggcgctgcatatggaaaccgcaatccctaacttcgtcatccacgaactgcaccggtatgcgctgctggagccgaatacacagacctgtaaatacaactacctgccgaagaacggcatgtacgaagtcccggagcttcccggcatcggccaggaactgaccgaagaaaccatgaaaaaatcaccaaccatcaccgtaaaataagccaactgtctgcctgcgccgcaggcagacaccctgtatttgcgagtcgtatcaacgcgaccttatccagcctgagataaaatcctctcagtaaaggggtaacacaggtggcaaatgaatttaactatccggcaatttcgcgcgtttctggccgtcgcggatttgcgtagttttaccgccgccagcaaatatctgtgcatcacgcagggagctgttagcggtttaatcaacgaaatggaaagccagatggaggtttcccttttcgaccgcacttcgcgcgtggtgaagctatcgcccgacggcgaaaagtttttacccgccgccatgcgggttgttgaagagtttcaacgggccgaaaattatgcccgcgacctgaaagagatcaaaaaatccctggtgcgggttgttggcgcgccgctgatcgcctgtgcttttctgccgcaaatcatccatgcctttaagcggcagcatccgcatacccacgtacagcttattgataagcccatgtcgcaattacaaaaaagcattatgttgggagaagccgattttggtatcggcccggagcggccgctggaaccggaaatcgacaaacaaacgctgttcacaacggaaatcgccctgtactgccatccggactatcggctgcataaaaaaacggttcgctgggaagagattcaaagcgaagagctgatcgccgttggcaacgaatccattccgatgatctccgcaaccgctggcgtgcgcattaagcccaaaatgacggtggaacatatggcgaccgccatgtcgctggcggcgcagtgtgaaggcgtggtgatcgccggaaccttttcccgccattacgccaaaagctaccaattagcgacctgttcgctcacgcctccgctgcggcgcaatatgaacctttatttccatgcgtggcgcgcacaaacgcccgccactcagcgctttagagattttttattcagctatgtcgatgaacatcatgatgccccggccaaccagcggtaggccggggattaaggcaggttaaatatcgatattcgctgctttcagggcgttctcctcgataaaggcacgacgcggctcaacggcatcacccatcagcgtagtgaacagctggtcggcagcaattgcatctttgacggtcacgcgcagcatacggcggctttccgggtccatggtggtttcccacagctgatccgggttcatttcacccagacctttataacgctggatagctagaccgcgacgtgattctttcaccagccactccagcgcctgctcgaagctggttaccggctggcgacgctcgccgcgttcgataaacgcgtcctcttcaatcagaccacgcagcttctcgcccagcgtgcagatacgacgatattccgcgccggtcacaaactcgtgatccaacggataatcggtatccacgccatgcgtacgcacgcgaacgatcggctcgaacagattctgttccgtattagtatgaacatcgaacttccactgactgccgtgctgctctttctcgttcagctcggtaatcagcgcattcacccagcgcgttacagtctgctcatcagaaagatcggcttcggtcagagttggctgatacaccagctctttgagcagcgctttcgggaagcgacgctccatacgaccaatcattttctgcgtggcgttatattcagagaccagtttttctaacgcttcgccggatagcgccggcgcatgagcgttcgcgtgcagagtcgcaccgtcaagcgcgatggaaatctggtactgatccatcgcttcgtcgtctttaatgtactgttcctgcttacctttcttcactttgtacagcggcggctgcgcaatgtagacgtggccacgctcgacaatttccggcatctgacgatagaagaaggtcaacagcagcgtacggatgtgcgagccgtcgacgtccgcatcggtcatgatgatgatgctgtgatagcgcagcttgtccgggttgtactcgtcgcgaccgataccgcagcccagcgcggtgatcagcgtcgccacttcctgggaggaaagcatcttgtcgaagcgcgctttctcgacgttaaggattttacctttcagcggcagaatcgcctggttcttgcggttacgcccctgcttcgcagagccgcccgcggagtccccttccaccaggtacagttcggacagcgccgggtcgcgttcctgacagtccgccagtttgcccggcagaccggctaaatcgagcgcgcctttacgacgggtcatttcacgggcgcgacgcgccgcttcacgcgcacgcgcggcgtcgataattttgccgacgacgattttcgcgtcagatgggttttccagcaggtattcgctcagcagttcgttcatctgctgttctaccgccgatttcacctcggaagagaccagcttatctttggtctgtgaggagaatttcggatccggtacttttacggaaaccaccgcaatcagaccttcacgggcatcgtcgccggtggcgctgactttggcttttttgctgtagccttctttgtccatgtaggcgttcagcgtacgggtcatcgccgcacggaagcctgcaaggtgagtaccgccgtcgcgctgcggaatgttgttggtaaagcagtagatgttttcctggaaaccatcgttccactgcagcgctacttccacgccgataccgtctttttcggtggagaaatagaagatattcgggtggatcggcgttttattcttgttcagatattcaacaaacgccttgatgccgccttcgtagtggaaatgatcttctttgccatcgcgcttgtcgcgcaggcggatggagacgcctgagttcaggaatgacagttcacgcaggcgtttcgccaggatctcatattcaaattcagtgacgttggtgaaggtttcgtggctcggccagaaacgtaccatcgtgccggttttatcggtatcgccagtgacggccaggggtgcctgcggcacgccgtgctcgtagatctgacggtgaattttgccatctcgctggataaccagttccagtttttgcgacagagcgttgactaccgagacgcccacgccgtgcagaccgccggagactttataggagttatcgtcaaatttaccgcccgcgtgcagaacggtcatgatcacttccgccgccgagacgccttcttccgggtgaatcccggtcggaatgccacggccatcatccgttacggacacggagttatcggcgtgaatagtcacgacgatatctttacagtgacctgcgagcgcttcgtcgatagcgttatctaccacctcgaataccatgtggtgcagaccggtgccgtcatccgtgtcgccgatatacatacccgggcgcttacgcaccgcatccagccctttcaggactttgatactggaggagtcataagaattcgacatcaacgtttctcgctcatttaatcttgggttaatccgttattttacccttttccacggtaaacatcttcgaattttcatccgacatgtctataacgtgttcagcgctaattgcgctgacaaagacctgcgattgcgtggcttttaagcggctggccagcagtccgcgacgcgcatcgtcaagttcagaggcaaaatcatctatcaggtacaggcagcgccgcccgctttcgcgggtgaggaactcgccctgcgccagacgtaaggcgcacatcaataactttagctgcccgcgcgacagggtatcttccaccggcgcgccgtcggcgcgaatgcgaaagtccgctttatgcggcccgtgcgcggtgtaggtcaacatacggtcacgctcaaagcttcgctccagcacgtccgcatagtctgtctctttctcccagccgcgctggaaagagaacgtcagggaaaattcaggtaaaaactgctgacaggtatccgccatgtcctgtgcgatagcgctactgtactccgcccgccaggtactaatttgttccgccagcggaatcagctctttatcccacgggcgcaattgctcataacgactcacctggcgcagcgcggcattacgctgtttcagcaatcgtttcaggttgctccaggcggtgaagaatccggcttcgttgtgaaagcatccccagtcaaggaacgctcttctgtatttggggccgccgttgagtaaagtaaacccctccggcgtaatcaactgcatcggcattaaatgcgccagctccgcgatcttgtgaccgtcggtaccgtcgatacggaccttgctgtcgccctgcttatctttggttaagccaatcgacgtctcacgctcttcgctctgtaatcgcccgtgaagaacaaacgcttcctgctcatgacgaatcacgcggccaggctgcaaactgcgaaacgcccgaccatggccaagcgtatagatagcttccagcacgctggttttgccgctgccgttggcgccaaccaggaagttaaagccgggggataaagcgagatccgcattttctatgttgcggaagtctttgattaaaaggcgcgtcagtgacatatattagtacattcgtccaggggcgtgtgtgtcgcagccagttcgtctaccgccagcgcgcagaaagcggagcgtacacgaagtacgtgagcatttcgagcactgccgggaggcgaaatggcaagtaaaccagccccttttcagattctacagcctcattggcataacaacgtaggcagcactctgtgacgccgcatcctcaatctgtacgctggatacggaatccgtcagcataatgcgcacggtttcgcacttcagcgcattgagcacgtccagcacgtaactgacgttaaagccgatttccatctccgtcccgccgtagctcacgtccagaatctcttccgcttcttcctgttccgggttattggcggtgattttgagctgattctcactgacgtacagacgcacgccgcggaatttctcattcgagaggattgctgcgcgggcaaacgcctgcttgaggatatcgcagcccgcttccagatgtttatccggattcttcggcagaacgcgacggtaatccgggaagcgaccatccaccagcttcgaggtaaagataaagtcgccgacgtgcgcgcggatattattactgccaatctgcacgcgcagcgggttttcgccgccgtcgagcatacgcatcagttcaatcacgcctttacgcggcacaatcaccgagtggctgggtaaagacgcttccagcggcattgagcacaccgccagacggtggccgtcggtcgcgacagtgcgcagttcgctaccttccgtttcaaacagcataccgtttaagtagtagcgcacatcctgatgggccatcgaaaactgggtcgattcaatcaggcgcttcatcgtggcctgcggcagcgtaaattcaacttcgctttgccagtcgtcaagattcgggaaatcggcggcaggcagcgtagacagcgagaagcggctacggccagaacgcaccagcatccgatcgccttccaactgaacggcaatctccgcgccctccggcaggccgcggcagatatcaaagaatttccgcgccggcacggtagtggcgcctggctcatgcggctgagaaagcgtaacgcgcgcgaccatctccatttcaagatcggtgccggtcagagaaagcgtaccgtccgctacctggaggagcaggttaccgagaatcggcagcgtaggacggccgcccagcgggccgctgacctgctgaagcggttttaataaatgttcacgttcaacggtaaatttcataggatcacgacgacaatgttctgattaaattcgaaaaatcttctttgatatcgtggctttcttcacgcagttgctcaattttacgacaggcatgaagtacggtagtgtggtcgcgcccgccaaacgcatcgccgatttccggcagactgtggttggtgagctcttttgccagcgccatagccatctggcgcggacgtgctaccgagcgagatcgacgcttagaaagcagatccgcaattttgattttgtaatactcggccaccgtcttctgaatattgtcgatggtgaccagtttttcctgcaacgccagtaaatcgcgcagcgcttcgcgcacaaagtcgatagtaatcgcccggccggtaaagttggcattggcaatcacccggttcaacgcgccttccagttcacgcacgttagagcgtagacgtttggcgataaagaacgctacttcgcctggcagacgaatatcattttcgtccgcttttttcatcaggatcgccacgcgggtttccagttctggcggttcgatcgccactgtcagcccccaaccaaagcgggacttgagacgatcctcaacgccgttgatctctttcggatagcgatccgacgtcaaaatgatctgctgattgccttccagcagagcgttaaaggtatggaaaaactcttcctgggatcgttctttattggcgaagaattgaatatcgtcgatcagcaatgcgtcaacggagcggtagtagcgtttaaactcttcgatggcgttattttgcagggcttttaccatgtcctgcacaaagcgctcggagtgcatatacacgactttcgcgttgggtttacgcgccataatgccgttacccaccgcgtgcagcaggtgagttttacccagaccggtgccgccatagaggaataacgggttataagcgccgccaggattatccgccacctgacgtgccgccgcgcgcgccagttggttggatttaccttcgacgaagttatcaaatgtatgttttacattgacgttggagcggtaggtcggctccgctggcgctggtacgttatcccagcccgaacgggccgcaggcgctacgcgctgcggctgcgccgttgttgtctgcgcaggcgcgacaacgttatgcacaggcgtttttagcgtttgcgtaacgggctttgttcccacttcaaaacgcagttgtggggcatccgcgccgcagaatgtgttgagtaatccattgatattgttgaggtacttatctcttacccaatcgagcacaaaacggtttggcgcatacaaagccagcgtgttatcgctcagttccgcctgcaacgggcgtatccacatactgaattctgtggctggtaactcatcctgcaatcgggcaagacactgctgccaaagcgaaagtgacacggcggactccactcgaacaaaagtcgataaatgacaaaggctgatacattaatgattgttggcgcacgtcgataagaccctgcatgaagggtgacgcacgaaccgctgtctgcggttttcacggatctttcaaacgatcgcgacttcacgcagtctgaaaaatttcgtgttcatgcctgaccaggatcgtttgaaacgatcaggaccgcggatcatagcctaaactgagcaagagatcttctgtttctcacagattcttccctatttatccacaggactttccaggaaaggataagtgtaatcgatcctggggaactcctgtacgctttcgcgcgcatattgaaaaaattaataggtaaaggtgagcagacgcctaaaagatcgcataaagatccagggcgatccttgcgctttacctggcagtccgtataattctccacccgtcgcgcaatgcccgtcatatggcgtcaacgctgcttattttccgcacaaaaaggcgtggaaaatcgcgggaaaataaggaaagagaattgactccggagtgtacaattattacaatccggcctctttaatcacccacactgtggcgtaagtcgttcaaagtttgttcgggtatacgcaaaagtcagtgaatttattcaagtttaggtagaaatcgccatgaaacgcacttttcaaccgtctgtactgaagcgcaaccgttctcacggcttccgtgctcgtatggctactaaaaatggtcgtcaggttctggcacgtcgtcgtgctaaaggccgcgctcgtctgaccgtttccaagtaataaagctaacccctgagtggttaagctcgcatttcccagggagttacgtttgttaactcccgctcatttcacattcgtcttccagcaacctcaacgggctggcacgccgcaaatcaccatcctcggccgcctgaattcgctggggcatccccgtatcggtcttaccgtcgccaagaaaaacgttcgacgtgcgcatgaacgcaaccggattaaacgtctgacgcgtgaaagcttccgtctgcgccagcatgaacttcctgcaatggatttcgtggtggtggcgaaaaaaggggttgccgacctcgataaccgtgctctctcggaagcgttggaaaaattatggcgccgccactgtcgcctggctcgcgggtcctgatagcccttattcgggtctatcaacgcctgatcagtccgctgcttgggccgcattgtcgtttcacgccaacgtgctcaagctacggaattgaggcattgcgcaggtttggagtgataaaaggcagttggttgacggtgaaacgcgtattaaaatgccaccctttacaccctggtggtgacgatcccgtcccgcccggaccatttgataccagagaacactaacgatggattcgcaacgcaatcttttagtcatcgctttgctgttcgtgtctttcatgatctggcaagcctgggagcaggataaaaatccgcaacctcagactcaacagaccacgcagacaacgaccaccgcagcgggtagcgccgccgaccagggcgtaccagccagtggccaggggaaaatgattacggtgaaaaccgatgtgcttgatttgactatcaacacccgtggtggtgatgtcgagcaggccttgctcccggcttacccgaaagaactgggttccaacgaaccgttccagctgctggaaaccaccccgcagtttatctatcaggcgcaaagcggcctgacaggccgcgacggcccggataacccggcgaacggcccgcgtccgctgtacaacgtcgagaaagaggcgtttgtactggccgacggtcagaacgaactgcaggttccgatgacttatactgacgccgcaggcaacacgtttaccaaaacgtttgtctttaagcgtggcgattatgcggttaacgtgaactatagcgtgcagaacgccggcgaaaaaccgctggaagtctccacctttggtcagttaaaacaatccgtcaacctgcctcctcatcgcgacaccggcagcagcaactttgcgctgcatacattccgcggcgcagcgtactccacgccggatgagaagtatgagaaatacaaattcgacactattgccgataacgaaaacctcaacgtcagctccaaaggcggttgggtggcaatgttgcagcagtatttcgctaccgcatggattccgcgtaacgacggcaccaacaatttctacaccgccaatctgggcaacggcattgtcgctatcggctataaagcgcagccggtactggtacagccaggccagactggcgcgatgaccagcaccctgtgggtcggcccggaaattcaggataaaatggcggctgttgcaccgcacctggatttgaccgtggactacggctggttgtggttcatctctcagccgctgttcaagttgctgaagtggatccacagctttgtgggcaactggggcttctccattatcatcattacctttatcgttcgcggtatcatgtacccgctgaccaaagcgcagtacacgtcaatggcgaagatgcgtatgctgcagccgaaaattcaggcgatgcgcgaacgtcttggcgatgataaacagcgccaaagccaggagatgatggccctgtacaaagcggagaaggttaacccgctgggcggctgcttcccgctgatcatccagatgcctatcttcctggcgttgtactacatgctgatgggttccattgaactgcgtcatgcgccgttcgctctgtggattcatgacctgtccgcacaggacccgtactacattctgccgatcctgatgggcgtaacgatgttcttcattcagaagatgtcgccgaccaccgtgaccgacccgatgcagcagaagatcatgacctttatgccggtcatctttacggtgttcttcctgtggttcccgtcaggtctggtgctgtactatatcgtcagcaacctggtcaccatcattcagcagcagctgatttaccgtggtctggagaagcgtggcctgcatagccgcgagaagaaaaaatcctgattcggtgtaggccggataaggcgaagccgccatccggcaaggcgcgccggtcagcctgatggcgctaacgcttatcaggcctacaatcaaaaggcggtcatatgaccgcctttttttattgcaacaaagttgagactaaccatgagccataacgacactatcgtcgcccaggcaaccccaccgggacgcggtggcgtgggtatcctgcgtatttccggtctgaaggcgcgcgacgttgcgcaagaggtgctgggcaagctgccgaagccgcgctatgccgactacctgccgtttaaagatgttgacggcagcgcgctggatcagggtattgcgctgtggttccccggcccgaactccttcaccggtgaagatgtgctggagctacaagggcacggcggtccggtgattctggacctgctgttaaaacgtatcctgacgcttccaggcgtgcgcattgcccgaccgggcgagttctccgagcgagcgttcctcaacgataagctcgatttagcccaggcggaagccattgccgacctgatcgatgccagttccgaacaggcggcgcgttcggcgctaaactcgttacagggggcattttccgcccgcgttaaccaccttgtggaagcacttactcacctgcgaatctacgtcgaagcggctattgattttccggatgaggagatcgactttctctctgacggcaaaatcgaagcgcagctcaatggcgtcatcgccgatcttgacgccgtgcgcaccgaagcgcgccagggcagcctgctgcgcgaagggatgaaggtagtgattgccggacgcccgaatgccgggaaatccagcctgctgaatgcgctggcaggccgtgaagcggccattgtcaccgatatcgccggtaccacgcgcgacgtgttgcgcgagcatatccacatcgacgggatgccgctgcatatcatcgataccgccggactgcgcgacgccagcgacgaagttgagcgtatcggcatcgaacgcgcctggcaggagattgaacaggccgatcgcgtgctgtttatggtggatggcaccacgacggacgccgttgaccctgccgacatctggccggactttatcgcccgtctgcccaaaaatctaccgattaccgtggtacgtaacaaggcggatatcaccggcgaaacgttgggtattagtgaagtaaacggtcactcactggttcgcctctcggcgcgtaccggcgaaggcatcgacgtgttgcgtaaccacctcaagcaaagcatggggtttgataccaatatggaaggcggcttcctggcccgtcgccgtcacctacaggcgctggcggaagccgctgaacaccttgagcagggcaaagcgcagctattaggcgcatgggcgggggaactgctggcggaagagttgcgcctggcgcagcaaagcttaagcgagattaccggcgagtttacctccgacgacctgctgggacggattttctccagcttctgtatcggtaagtaagttttagtccaccctcgtcagtgaacgttcactaacccgcattaactgcctgttaacgcgggtttttactttccatactcgtccatagtcgtgcgggttcatccgcgatttttgtgtcctgaattgtccccatctttaaatccctcgtgtaccattgtttactttttgatctaaaaattacatcaaatgaacacaaaaaacggtataaaaaacgctcaaatatcccttctcatggacacactatagaggtgagatatggcactttcagataccaaattacgcacacttgctcccagaaaccgcccctggcaacttgccgatcatgacgggttggtgattgaagttcttcccaccggacgaaaaatctggcgtttccgctaccgctttgacaacaaatcgcaacagatcacgctgggcgaatacccagctttctcacttgcagaagcgaggctctggcgtgaaaagtgccgctcactggttgcccatggcatcaatcccgcgcagaaaaagcaggaagaaaagcttaaacagaaagacccaacgacagtcaaaacattcgccaaacgctggctgaccgatatcgttgaaaaaagtaaccgcgatccacgcaacatcactcgcgttatcgagaaggacatcattcccatcatcgggaagctggaactcgaagaactcacaactgcccacattcaggtcgtgctcgaccgcatcaagcaacgaggttcggatcacgtcgcattactgacgtgaaacgtgcttaaacgcatgctggcctatgcaatttccaggggaatcatcttcaacaacccggcagcggctatcgaggctcgttatatcacacaagcaacaagtcgtgatgtggcactgaccgcagaagagatcggcatcctgttacgggggatctacacctctaacatgaaccgacgccacaagctggccctgcacctgctgatcatctgcatggtgcgtaaatcggaattgattgaagcaacatggagtgaagttaacttcaacgcgctggaatggcgtatccccggcgaaagaatgaagatggataatccacatattgttccgctgtcaaagcaggcgctggcgatgttcgaagagctaaaatttctggccggagattccccttacgtcttccccagccgacacggctaccgacgtccgatctccaaaacaacgctgaactgtgcggtgcgtacgcaggatctgaacgtcagggattttgttattcatgacttccggcgtactgccagcacattgctacatgagcagggctacaactcggattggatagagaaatacctggcgcataagatcggcggcgttcacggtgtctacaaccgtgcggagtacctgaatcagcgccgggagatgcttcagtcttgggctgattttgttgatgcgcagattgagactggaaggaaggttatcattggacaattcgggaagtcttacaatgtaaccgtatgaataatatggaaaatataacaataatagtttctgattagaatatactatctaaccggttgaaaaagatgcacttctcaaccataataacatcactctttagcgttaggctttgatttatagccttgtcgagcgtttcgccagacactaacttattgagtacttttagggttgcgctagaaagttttctaccgatcctagaagtctctaggatcggtagaaaactttctagcgcctcctctagtaaagagtaaaaaacgagcaaaaaacattgctcgtttttttcatcaacggaagacaaatcaaaaatacataacgtttaaatcaatgtttgaagaaactattaaaaaacaatttgaattgttagacataagtaacttcaatgttgatatatctcatcgtctccttttcgtgtgtggtggcaaagtcgatgtacgtgcaccaattccccccagttttagggatagactactcacttacacagcaaaaaatgcctctgaacttcacgaacatttcattctagctgagacattcaaggattattttaaagagaatgcctatccggaccttctggtgtttgaagatgatatagccagtatttcatctcttattatcatttttttagaaagcccaggatcattagttgagttaggtatattttgcaacaaatcagaactatttaaaaaaatactgattgttgcttcagcggaagaagtatacggtgaggactcattcatttatttaggcccactagagtatattaagaagaaagtctcatcctctgttgtaatctatccttggccggatcctgaagtcttaaaatacgataatgattttcttgatgatttatgtgtaaatataaaagaaaaactttcatcaatcccaaaaacagaacaattcagtaaggataattctggacatatagcacttctaattactgaaattatatctctttgcgccccaatacaacttagtgaaatagaatcagccctaaactcattagggattaatatttcaacaaaaattattaacagatcaatttatttacttcagaaagttggttttatagacgttttatcatatagctcaaacaaatattactttccattaaaagagcgcaaatgggtaaaatttggtaaaactaaagataataaactcatagataatcaacaattaaaaatgaaggttagacaatcttttgtaacattaaccgatccattatcaaaacgaagaattacagcgctgcgtcaaataatagcaaaaaaagaaatggctgaggagattaattaatggacatattacagcatatttcagatttactattaaccaagaaaagtgaaatcatttccttttcattgacggcaccttatcgctataaaatatataaaattgcaaaaagaaactcagataagaagagaactattgctcatccttcgaaagaactaaaatttatacaacgtgaaattactgagtatttaaccgataaattacccgttcatgaatgcgcatttgcatataaaaagggcagtagcattaagaccaacgctcaagttcatcttcatacaaaatacttgttgaagatggattttgagaattttttccctagcataacaccacgtctatttttctcaaagttacgacttgcaaatattgatttaactgcagatgataaagtactacttgagaatatattattcttcaaatccaagagaaatagtaatttaagattaagtattggagcaccaagctcacctttaatatcaaattttgtgatgtacttttgggatattgaggttcaagagatatgctctaaaataggcgttaactatactcgttatgctgatgatttaaccttttcaacaaataataaagatgttttgtttgatatacctgacatgcttgaaaacgtactgcctaaatattctttaggtaggattagaatcaatcatgaaaaaacagtgttttcttcaaaaggacataaccgtcacgttactggtataactctaacaaacgataacaaattatccataggtagagaaaggaaaagaaaaatctctgccatgatccatcattttataaatgggaaattatctactgacgaatgcaataaattagtcgggctacttgcatttgctaaaaatattgagccttcgttttataaaagcatggtcattaaatatggatctgataatatttataaattacaaaaacaaaaagacaaataatttctgctgcacttttatagacaccagtgttttgttgattatgcccagaacaacttggaataagttttcctaagcgtattacattatacgcttggcctaacttaatcatagattttccagaaaaataaatttttcaaatcccataaacaattccccacagcttccctacgcccccggtcaaccagggaacgaagcgtggcctgaaactgacctcctgtctcgatacaggtgaccacaccctttatcgctaccctgttgcaagcgtagcggcagacagaacgctgtagataagtcggacggcattgccgaaggctttccgtccgtacttcctgctgaatgtgcaaaacgcggcgtcacttttaagagcgtaagagagtgaaagtgacgccagcgcgcagatcagcttcaacccggctactgcctgcaaatccactgcaacaaactggctgacactcaaacagatgtcagaaattcacttaccagggtcaatctggccgggatctcaaaaaatgcatggaactaaaacgggtctatttacagtttcaccagctacttggtttttgtgtcctttaatgtgcccatagccatgttttcaaggcaaattatagattatatatcaacgaattatctagattttccagtttctgtattggtgtcgggtgacggctgacgccatccggcttacgtcactgccggggtgatatctcattgcctcataggaaatcactgttgtccaaatggcaactcgtctcgcgcaacatcgccccgtattcttagcgccacacttttcgtgaggccgctatgaaacgttttctactgtgtagttttgccctggttttactctatcctgccggtattgatatgtatctggtcggtttaccgcgtatagccgccgatctgaacgccagcgaggcgcagttgcatatcgccttctccgtttacctggccggaatggcgacggccatgctgtttgccgggaagatagccgaccagtcaggccgcaagccggtcgcgatcgtcggcgcgctcgtctttatgatggcctcactgctttgttcacgggcgtcggaaggctcgctatttctgagtgggcgttttcttcagggagtaggcgcaggcggctgctatgtggtggcgttcgccattctgcgcgacacgctcgacgagcatcgccgggcgaaagtgctgtcattattgaatgggattacctgtattgtgccggtactcgccccggtggtggggcatttgattatgcttcgtttcccctggcaaagtctgttctatacgatgtccgcgatgggcattattgtgggcctgttatcactgtttatcctgcgcgagacgcgcccggtaaggctggctccacgcgatttatcacgatcgtcgcccgccgccgagtcgctgattaaccgttttttcgttagtcgactggcgatcaccacccttagcgtgtcggtgatcctgacctttgtcaatgcctctccagtgctgctgatggaggtgatgggatttagccgtggcgactatgccattaccatggcgctcaccgcaggcgtcagtatggtcgtctctttttccaccccttttgcgcttgggttatttaagccgcgaaccttaatgctcgtctcacaggggctgtttttgacggctggcgtgacgttaagccttgctcataccaataccgtcacactctttggcctgacgcttatctgcgccggattctcggttggttttggcgtcgcgatgagccaggcgctggggccgttttcgctgcgcgccggagtggccagttccacgctcggtatcgcgcaggtttgcggttcatcactgtggatttggctggcggcaatactcggtatcagcgcgatgaatatgctgatcgggattctgattggttgtagcatagtgagtattctgctgatcttctccgtcacgcccaacaggtccgtagccgagcatgaagaaatcccttaccaatctcgaccttaatttgctgttatgcctacagttactcatgcaggagcgcagcgtcactaaagctgcaaaacggatgaacgtaacgccctcagcggtcagcaaatcgctggcgaaactccgggcatggtttgacgatccgctgttcgtcaatacgccgctgggcctggcgccgacgccgctgatggtcagtatggagcaaagtctggcggactggatgcagatggggaatcaactgcttgataaaccgcatcatcaaacgccgcgcggtttaaaatttgagttggcagcagagtcgccgctgatgatgattatgtttaattcactgtcgcagcagatttatcagcgctatccgcaggctaccattaaggttcgcaactgggattatgactcgctggaggcgattacgcgtggggaagtcgatatcggatttaccggacgcgaaagccatccccgctcgcgagaattgctcagtctgttaccgctcgcgattgattttgaggtactgtttagcgatttaccgtgggtctggctgcgggaagatcatccggcgctgcgcgaagcgtgggatctggacacttttctgcgctacccacatatcagtatttgctgggagcaaagcgatacctgggcgctggacgatgtcctgcaagaaatgggacgcaaacgccatatcgcgttgagcctgccggggttcgagcagtcgctctttatggccgcccagccgggtcacaccctgatagcaaccgcgccgcgctattgccagcactacaatcagctccaccagctaccgttagtggcgcgccccctgccttttgatgcgcaacagcgggaaaagctgatggtgccgtttaccctattatggcacaaacgtaatagtcataatcccaagattgtgtggctacgacaggctatcaacacgctctgccgtcgccttatctgaccacctgcgttgataaattaaccttcctcttaccagaaatgtcaccatctgattaaagaaccttctgaaattgaatttttagcgcgtaaaacctgtccataatttacgttaatgttactctcgtcattatcacggcccattaatcacggagcgaaaaatggcgactcactttgccagagggatacttacggagggacagttggtttcaattcgtctctcttcgtcttgccatattgaagccagaaacctgcctgctcaccgacgaacgcgttttctcgcctccagaggccttcttgccgaactgatgtttatgctgtacggaattagcgagctgccggaaatcattattcaggcgaaaggtaaacccgcgtttcgtgacaaaaatctgccaggcttttctatctcctatgccggaaatatggttggcgtggcgttgaccaccgaaggagagtgcgggctggatatggaattacagcgcacctcccgcggctttcaccatccgcattcgctcgaacgccaccctttctcccgtaatgaaaacttatgggtagccaatcaaaacgatcccaacgaagcgcgagcgcaactcatcacattgcgccagagcgtgttaaaactcaccggcgatgtcatgaatgacgatccgcgggagctgcaacttttacccgttgccggacgcctgaagtgcgcgcatgtcacgcagcttgaagccgtgtgcgatgcggaagatgtgctggtatggtccgtaaccgttacgccagcgatagaaaaattaaaagtgtgggagttcgatggcaaactgggctggaaaagcctgcccgatatccagacgcgcgccaatgagccaaccggtcgtctgatgcgattcgcccaactccccgccgccaaatcgtatacgcttaatcgttcataatgaaaaaaggggcacgtatgtctgaaacgctgaatgtggttacactgctgggaagtttacgcaaaggttcctttaacgggatggtggcgcgtacgctgcctaaagtcgcgccggcaggaatgacggtatcgccgctgccttcgatcggggatattccgctgtatgacgccgatatccagcaggaagagggatttccagccagcgtagaggcgctggcggagcagattcgcaacgccgacggcgtcgtcattgtgacgccggaatataactattccgttcccggcggcctgaagaatgccatcgactggctatcccgtctgcctgagcagccgctggcgggtaagcccgttcttatccagaccagttcaatgggggcgattggcggcgcgcgctgccagtatcatctgcgccagattctggtgttccttgatgcgatggtgatgaacaaaccggagtttatgggcggcgtgattcagaataaagtcgacccgcagactggagaagtggtggatcagggaacgttagatcatttgaccggtcagttgaccgcatttggcgagtttattcagcgcgttaaagcgtaagttcgttaaaaaccctcccccgatggggcgagggttcatttcatcagtgtgcgtcaataaacacaatcttcagcacaaataacagcgcgacaatcactacgcacgggctaaggtcgcgcaggcgaccggtaccgattttcatcacgcagtaagagataaagcccagcgcgataccttcggtgatcgagaagctaaacggcatcattaccgccgtaataaacgccgggaccgattcggttaaatcctgccagtttacccgcgccaggctggaggtcatcagcacgccgacgtaaatcagcgcgcccgccgccgcgtaaggcggcaccatgcccgccagcggcgacaggaagataaccagcaggaacaaaataccgaccaccaccgccgtcaaaccggtgcgaccgcccaccgaaacgccggaagaggactcaatataagcggtcacagaagacgttccgacaaatgcgccagtgacagaagagatactatcaacaaacagcgcctgcttcatgcgcgggaatttgcctttctcatccgccaggccggctttatcggtcacgccaatcagcgtaccggaggagtcaaacaggtttaccagcatgaaggagaaaataacccccgccaggccaagattgaacgagcctgccaaatcgacatgccctaccacgctggtgacgcttggtggcgcggagacaataccgttgtagtgtacatcacccatcatccagccaagcagcgtcgtgacgatgatggacaccagcaccgccgcatgaatgttgcgcgaagcgagaatcgcaataataaagaatccgagaacccccagcagcacgctgtgcgaggtcaggttgccgatgctgaccagcgtttccgggttagcgacgatcacgccggcgtttttcagccccatcatgccgataaacaggccgatgccgctggtgatgcccacgcgcaggctgaccggaatgttggcgatcatccagtaacgcacgcggaagatagtcagcaataaaagaccaacagcgccccagaaaatggcgcccatgcctacctgccacggcagtcccattgcctgcacaaccacgaaggcaaagaacgcattcagccccatcgcgggcgccagcgccaccggcaagttagcgaacaggcccatcagaatactgccaaaggccgcaatcagacaggtggtcacaaagacggcgctggtgtccatgccagctacgcccagaatttgcgggttaacaaaaacgatataaaccatcgtcaggaaagtggtaaaaccggcgatcacttcggttcgtgccgtcgtgccatgttcgcgcagtttaaacacgcgttccagcataccctgaccagaagcctgggtggtgtgttgttgactcattatcaatttccggagaaaggagggaaaattcgccgttatcctataccaaaatgcgacacctggcgcagttgtgtggtaatttttttcactcaatttgttagtacggcaacgattgcgtcccctcattcagcattacgtaaacgttaaacttgttaaaatggaaatgacatgtcccaaatcgaagcagtgttttttgactgtgacggcacgctggtcgacagtgaagtgatttgctcgcgcgcctatgtcactatgttccggcagttcggcattacgcttgagctcacggaagtattcagacgctttaaaggcgtaaagctctacgaaattatcgataccatcagtaaagagcatggcgttgcgctggcaaaggcggagctggaacccgtgtaccgcgcggaagtggcgcgcctgttcgataccgaactggaagcgatcgcgggcgcaaataccctgctggagagcattaagacgcccatgtgcgtggtatccaacgggccggtcagtaagatgcagcattcgctgggtaaactgggcatgttgcatcattttcccgatttgctgtttagcggttacgatattcaacgctggaagcccgatccggcgctgatgctccatgcggcgaacgccatgaaggtcaatgttgagaagtgtattctggtggatgattccagcgcaggcgcgcagtcaggaattgcggcgggaatggaagtattttatttctgcgccgatccgcataacaaaccgatcgatcaccctaacgtgacgacgtttaccgatttggcgcagttgccgggattgtggaaagcgcgcgggtgggagattacgcgttaactgaaatgcccggtggcgctaacgcttatccggcctacagcatctgtacctgtaggcccggtaagcgcagcgccaccgggcaaaagaatgagatttactctttcggatctttccccgccagcagcttatccagctcatcgccgccgacgtgacggaaatcctgccccttcacgaagtagaagatgtattcgcagatattctggcaacggtcaccgatacgctcgatagagcgcgcgcagaataacgcggtcagcacgctgggaatggtgcgcgagtcttccatcatgtaggtcatcagctgacgcacgataccttcgtactcctggtcaactttcttgtcttcacggtagatacgcaccgcttcgtcgagatccatgcgcgcgaacgcatccagcacgtcgtgtagcatctgcacggtgtggcggcccagtgactccagactcaccagcagcggctgatgctgctgggagaatttctccagcgcggtacggcagattttatccgccacgtcgccaatgcgctccagttcggcgatggttttgataatcgccatcaccagacgcagatcgctcgccgtcggctggcgcttggcgataatacgcacgcaggcttcatcgatggcgacttccatcatattaacctgatgatcgccttctaccacgcgcttcgccagctcgctgtcctggttgtgcatggcggtgatagcgtcagaaagctgctgctccaccatgccgcccatggtcattacctgagtgcggatgctttccagttcggcgttgaactggccggaaatatgtttattaaggttcagactgtccattacgcactcctgaattaaccgtaacgaccggtgatatagtcttctgtttgtttcttcgcgggcttggtgaacagatcgtccgtgttgctgaactcaatcaactcgcccaggtacataaacgccgtatgatcggagcaacgtgccgcctgctgcatgttgtgggtcacgatcaccacggtgtaatcctgtttcagctcggtgatcagctcttcaatacgcccggtagagatcgggtccagagctgaacatggctcatccagcagcagcacttccgggcgaatggcgataccgcgcgcaatgcacagacgctgctgctgaccaccggagagagagtacccgctctggtgcaatttatctttggtttcgttccataatgcggctttggtcaacgcccactgcacgcgctcgtccatatcggcgcgagacagcttctcaaacagacgcacgccaaaggcgatattgtcatagatggacatcgggaacggcgtcggcttctggaataccatccccacttttgcgcgcagcagcgcgatatcctgggtgttggtgagaatattgtcgccatccagcagaatttcaccttccgcgcgctgctccggataaagcgaatacattttattgaaggtacgcagtagcgttgatttaccgcagccggatggcccgataaatgccgttacctgattcttcgcgatatccagattaatgttcttcagggcatggaatttgccgtagtagaagttcaaatcacgaacctgaatcttactcggggcagtttcaaccatactcatttcactcttttcctcatccagcgccgcatccgccacgccgtaaaataatgcctgatggcgctacgcttatcaggcctacaatgtctttaaccgtgttttttcttcgcgaaaacaacacgcgccagaatattcagcagcagtacgcacagggtaataatcagcacgcccgcccaggctaattgttgccattcggcaaacgggctcatcgcgaatttaaaaatggtcaccggcaggttggcgatcggctgcatcatgtcggtgctccagaactggttggagagcgcggtaaacaacaatggcgccgtttcgccggcaatacgcgcaatagccagcaggataccggtcataatgccggagatagaggctttcagcgtaatcgcggaaatcatcttccacttcggcgtacccagcgcataagcggcttcacgcaggctatccggcaccaatttgagcatgttttcagtggtacggataacgatcggtacctgcaacagcgccagcgcaatcacccctgcccagccggagaagtgctgcatctgcgccaccacgatggtgtaaacaaacagccccacaacaattgacggcgcggaaagcagaatgtcgttaataaagcgaatgatttccgccagccaggatttacggccatattccgccagatagatcccggccataatccccagcggcgtacccaatacggtagcccagagaatcaataatccactccccgccagggcgttcgccagcccgccgcccgccgtgttcggcggcggcgtcatttcggtaaacagcgccagcgacatcccgtcgataccacgcgtgatggtggacatcaaaatccagatcagccagaacaggccaaatgccatcgtcgccattgagagcgttagtgcgatacggttcttcatgcggcgacgcgcctgcatcttgcgacgggattccgcgagctgcgcggtgttctgcatatcaagcgtagccattaacgtgctccctcgttcttcgccagacgcataatcatgaacttagacgccgccaggacgataaaggtgatcacaaacaggatcagccccagctccatcaacgctgccacgtgcaggcccgattccgcctcagcgaattcgttcgccagcgcggaagtgatgctgttgcccggcatatacagcgacgcgctgtcgagctggtaagtgttgccgatgataaaagtgaccgccatcgtttcacccagagcacggcccagccccagcataatgccgccgatcacgccatttttggtgaacggtagcacgatgcgccagataacttcccaggtagtacagccgataccgtaagcggactctttcatcattaccggtgtttgctcgaagacgtcgcgcataaccgccgcaatgtaggggatgatcatgatggcgaggatgacgcccgccgccagaatgccgataccaaaggccgggccggagaacagcgcgccgacaaacggaatgttggaaagaatattgccgaccggctcctggaagtacgtcgcaaacagcggcgcgaagataaacagcccccacatgccgtacacgatactgggaattgccgccagcagttcaatggcgatgccgagcggacgctttagccagcctggcgccagctcggttaaaaacagggcaatgccgaaactgaccggaacggcgatcagcagtgcgataaaggaggtcaccagcgtgccataaatgggcaccagagcgccgtagatatcgtttggcgcgtcccattccttagtccaaagaaatgagaaaccaaatttctgaatacttggccaggaggagatgatcaatgagacgataataccgcccaacatcaatagcacaatcagcgcagccagttttaccagcgcgctgaaaatcatgtcgccttttttacccggcgggttaaaagcaggcttggttgcagccataaattactctttccattaaacgcattttacgacgttgcccctgccggatggcgctacgcttatccggcctacaacgtgggcctgcggtcgaaaccgtagggcggataagcgtagcgccatccgccaattcgttaattaatacagcgccttaccgttgctgtcttttatactggtcttccatgcagcacgaacctgctcaacaacgttatccggcaggctggcgtagtccagatcattcgcctgcttagcgccatttttgtaggcccagtcgaagaacttcaacacttcagcaccctgctcaggtttcttctgcgctttgtggaccaggataaacgtggtggaagtgattggccacacatcgtcacctttctggttggtcagatcctgcgcgaaggttttgctccagtctgcgcctttcgccgcattagagaagctctcttccgtcgggcttaccggtttgccgtcggcagaaaccaatttggtgtaggccaggttgttctgcttggcgtaagcgtattcaacgtagccgatagcgcctggcagacgctgtacaaatgccgcgatgccgtcgttacctttaccgcccagaccggttggccagttcacggtagaacccgcgcccactttcgatttccactcgtcgttgactttcgccaggtaactggtgaacacgaaggaggtaccggaaccgtcagcgcgacgcaccacagcgatgttctgagaaggcagcttcacgcctgggttcagtttggtgatggcttcatcatcccacttcttgattttaccgaggtagatgtcacccagcgttttaccatccagcaccagttcgccggatttgaggcctggaatattcaccgccagcaccacgccgccgatcaccgtcgggaactggaacaggccttcctgattcagtttttcgtcagacagcggcgcatcggaagcgccaaaatcaacggtattcgcggtgatttgtttcacgccgccggaagagcctatcccctggtaattgactttgttaccggtttctttctggtaggtatccgcccatttggcatacaccggcgcaggaaacgttgcaccggcacctgtcaggcttgctgctgcaaaggcagagaacgcgctcatcgataaggtcgcggcgacaacagttgcgacagtggtacgcataactttcataatgtctcctgcacggtttcggtaaatcgttgtttgagttgctacgatgagcaaaataggacaaattgatgacagttatatgtcttgattatgacggtttgatgacaatggaaataaaaaaagctggcccggggagacaccagaccagcctgcagggggagatgaattagactgtttgcgcaaccgcagacggtttcaacagcgcgtacatcaggccgcagacaatcgtgcccagggcaatcgagagcagatattgcatcacatgttctaccgcatgcgggatcgccaggacaaagaggccaccgtgtggcgccatcagtgtacaaccgaaatacatggacagtcccccggcgattgcgccaccgaccatcgtggaagggatgacgcgcatcgggtcacgcgcggcgaagggaatcgccccttcagagataaagcacagccccagaataaaagatgcattacccgcttcatgctcagcggcattgaatttcgctctggccgcccaggttgcgacgcccattcctaatgccggtaccatccctgccgccataatggccgccatcggcatataggaatgagaagccagtaaaccgacgccgaaggtatacgcagctttattcaccggcccaccaaggtcaaaaccttgcattgcgcccagcaacattcccagcaagatagcattcgtagaggtcatattccccaggaacgtcgtcagcccttccatcaccgcagacaccgggccacccaccacgtaaatcatgattaggccggtaatcagcgtagacagtagcggcagaaccagcacaggcttaagcgcttccattgacgctggtagcttaatattttgcgccagaaaccgtacgctgtaaccggccagaaaaccggccacaatccctcccaggaaaccggcgccgcacaggctggccaacatcccgccaataagccccggggccagacccggacgatcggcaattgagaaggcaataaacccagccagtaccggcaccatcagcgcaaaggccgccttaccaccgatttgaaataacgcagccgccagcgtgcccggctcgttgaaggcctggataccgaagacaaaagagagtgcgatacacaatcctcccgccaccaccaaaggaagcatatgggatacgccggtcattaaatgcttataaacgccgggtagctctgttttaccagctgaagaagagcgcccggcactcccctgatagacctcggcgctattgaaagcattatccatttcctgcgcactcttttttagcgccgcgccggtactggtgcgatagagtcttttgccaacaaagcctgacagatccagctcaatatccgccgcgataatcaccacatccgcctgcgctatctcttccgcggtcagcgtgttcttcgccccgacggaaccgcgggtttcaaccttgatccagtcaccacgcttgcgggcttcaatttccaacgcttctgccgccataaaggtatgggcgacgcccgtcggacaggccgtcacagcaacaatttttttagtcatagtagggtaccctgttcttttaatttaaagaaaaagcgggaaaaaatgttacaggcgtgaccaggccgctgctttctggaacagcgcgtcatccgggcgaatcccggtataaaggacaaattgctccacggcctgaatagcaaacacttcggaaccggtaatcacggttttaccgcgttcacgggcgtagcggattagcggcgtgacgggcggtagcgccaccacatcaaagataacgctcgccttatccacttcctgttcggaataagaaagtttgtcggcatcattaccgccagccattccgataggcgtggcgttaattaacaaatcagcttcaataccgtcggtatccgggcgccattcatagccatagagttcggccagttgtttacctgacgcttcatcaatcgcgacaatataaccacgggtaaaccccgcatccttcagcgcgcaggccaccgcctttgccataccaccgctgccacgcaaagcaaacaccaggtcgggagagaccttgtaattcgccagcaagcgagctattgcaatgtaatcggtgttgtacgccttcagatggccattggtattcacaatggtattaactgagtgaatggcctgagcggaagcatccagttcatccaccagcggaatgcaggcttctttaaacggcatagagatcgcgcatccacggatccccaacccgcgcacgccgctaatggcctgcgtaagatcggtcggcgaaaaagctttgtagagataattgagatccagcgcttcgtacagatagttgtgaaagcgtgtaccgaagttacttgggcgtgccgccagggacatgcagacctgagtgtctttattaatgcgctttgtcatgatgaatcctcatagaagttgcgatagagaaaatcatcggctaaaaaggggatattaaaaattgctcattcccgttcgggaaatttcaccttttatgacaacccggcacactgaacaaaaatacttaaagctactccagcactatggcgacaagcctgttagcgtgacattacaggagctggcggatgtgttgttctgcacccgacggcatatgcgtaatctgttgcttcagatgcaggaggcaaagtggctcatctggcaatcacaggccggacgtgggcatcgcgcccggcttcacctgcgctataaaccagaacagctgttaagcgaaaaggcggagcagttactggagtctggtcatattgatcaggccattcagctgctgggtaaaaataagcaccaggtggcgcaactgctgcgttcaaagctgggctatagcgtgcgggcagactatcagcggctgtgcatcccctattatcggacaatgccgtcgctgtgccccggcataccgttgcgtcgctctgagcagcatctggtcaggcagatttttagcggcctgacgcgcataaatgaggaaaaaggtgaagtcgaagccgatcttgcccaccactggcggcagattgatccactgcgctggcgtttttatctgcgccccgccgtcctctggcatgatggtcaggagctgacgatcgacgcggttatcgcttcactgacccgcagcgctaagctgccgttgttctcgcacttgcagaccattcaggccaccgggccgctgagccttgaaattacgctggcgcacccggataaccgactgccgctgctgctcagccatattgatgccatgatcctaccgcctgaccatacacaacgcgctgatttcccggcacatcctgtggggactggcccttatgaggtggtggaaaacaatggctttcatctacaaatgaaggcctttgaccactatttcggtctgcgcgggctgctggatgaagtggaggtctttatctggccgaatttaacggagacagacaacctggcggaatcgctgtcggataacgacacggcagcctggctcagctccagcctgagcgatgaggattacgtttccggacggcttagccaggtatcaggcaaaccttctgacaacctgcgcgagatgtttcttgagcgtggaggatattttttattatgcgacagccgctccccgcactggcataccgccgaacatcgccgctggctacgggaaacactcagcccttacgccatactccagcatctgagtgaggcaattcgccccttctgggtaccgggcggcagcctgctgtcctcctggtttcatactattgaggcgggcccggcctgttcaccttttatctcgtcgtcgccctacgcaaaactgcgtctggcctatcacgatcagcaccctgaatttccaatgctcctggatatcatgcaagagatcatgcgccagcagggcattttacttgagggcgttgagctgaattatgatgactgggcgaatggcaaagccaatgtggatctctggctggggacggtcaatttccccattcccgaagagtggaacgtcggtacatggctactgggctcccctttactgcgccacgccatcagtggtggggatgatgcgctgctggcccaatgggaaacccagtggcatgccgaaaccatcagcgcggaacaactggtcagggaaaccacccgttcaggctggctacagccgctttttcaccactggatgcgactcaaaagccccgaccgggccagggggatccacctgaataacctggggtggtttgatttccgatccacctggattgagccagggccttaaagaagagaatgtgaccgggtgcccgtagcgcaggcaggcgtagcacctcttagtcgctcttcagccaccatagagaaagaacagcgcctgtcacagcgcacaaaaaaaggccgtctgtcgacggccttctgcctggtactacatttgtacttactctacggtaaccgatttcgccaggttacgcggctggtcaacgtcggtgcctttaatcagcgccacgtgatacgccagcagttgcagcggaacggtgtagaagataggcgcaatgacctcttccacatgcggcatctcgatgatgtgcatgttgtcgttgctgacgaaacccgcatcctgatcggcgaagacgtacaactgaccgccacgtgcgcgaacttcttcgatgttggatttcagtttctccagcagttcgttgttcggcgccaccacaatcaccggcatatcggcgtcaatcagcgccaacggcccgtgtttcagctcgcctgcagcataggcttccgcgtgaatgtaagagatctctttcagcttcagcgcgccttcgagcgcaatcggatattgatcgccacgccccaggaatagcgcgtgatgcttgtcggagaaatcttctgcaagcagctcgatgcgtttgtcctgcgacagcatctgctcaatacggctcggcagcgcctgtaggccatgaacgatatcatgctcaatggacgcatccagacctttcaggcgagacagtttcgccaccagcatcaacagcacggttaactgggtggtgaaggctttggtagatgctacgccaatttccgtacccgcgttggtcatcagcgccagatcggattcacgcaccagcgaagagcccggcacgttacaaattgccagagagcccaaatatcccagctctttcgacagacgcaggccagccagggtatctgcggtttcgccagactgtgacagggtgatcatcaggctgttacggcgcacggcagatttgcgataacggaattcagaggcgatttcaacgtcgcacggaatacctgccagcgattcaaaccagtaacgggaaaccataccggagttgtaagacgtaccgcaggcgaggatctgaatatgctcaaccttcgacagcagttcgtcggcgttcggtcccagctcgcttaaatccacctgaccgtggctgatgcgcccggtaagggtgtttttgatcgcgttcggctgttcgtagatctctttctgcatgtagtggcggtaaatacctttatcgcccgcgtcatattgcagattggattcgatatcctgacgttttacttccgcgccggtgttatcgaagatatttaccgaacggcgagtgatttcagcgatatcgccctcttcaaggaagataaagcgacgagtcactggcaacagcgccagctggtcagaagcgataaagttttcgcccatacccaggccaatcaccagcgggctaccagaacgtgccgccagtagggtatccgggtgacgggtatccataattaccgtaccatatgcgccacgcagttgcgggatagcacgcagaacagcctcacgcagagtaccgccctgtttcagttcccagtttaccaggtgtgcaatcacttcggtgtcggtttcagaaacgaaggtatagccacgcgcttttaacgcttcacgcagcggttcatggttttcgatgatgccgttatgcaccaccacaatgtgttcagaaacatgcggatgcgcgttagcttctgaaggttcaccgtgcgtcgcccagcgagtgtgagcaataccagtgccgccatgcagaggatgttcttccgctgcctgagccagcatctggactttaccgaggcgacgcaggcgggtcatatgaccttctgcatccaccacggccagaccggcagagtcatatccgcggtattccagacgacgtaaaccttcgagaaggatttcagctacatcacgctgcgcgatagcgccaacaattccacacatagttttatttcctgattatggcattacgccatgcgttgtcgctgacctgtatgcccgtcgttgcgggcgccccgagccttgtagagagtggggttatttttataagtactgctcatggagcggaggattattttatcctctcatctccggtctgccggatggcgctgacgcttatccgacctacaaaatcactttttcttcaccggacgctgccagccttgcttatgcacctgcggcacgcggcttaataccagttcattgtcggctacattacgggtgacggtagtccctgcggcgatggtggcccctttaccaacagtaaccggcgccaccagttgggtatcggagccgacaaacacatcgtcgccaataaccgttttgaatttgttcgcgccatcatagttacaggtgatggtccccgcgccgatattcacgttgtcgccaatttccgcatcgcccaggtaggtcagatggccggctttagaacctttaccgagacgcgcttttttcatttcaacgaaattgccgacgtgagcgcccgctaacagctccgcgccgggacgcaggcgagcaaacggaccgatggtgcaggccgcttccagatgcgcatcttccaccacgctgtatgggctaatttcgcagtcatcgccaataacgctgtttttaataatgcagcccgcgccgatcttcacgcggtgaccgagcgttacataaccttcgatgataacgttagcgtcaatttccacatccattccacaatgaagggtgccgcgaagatcaaaacgtgccggatcgcgcaacataacaccggataacagcagtttctccgcctgttcggcctggtaaatacgctccagacgagaaagctgtagacggttattcacgccgtccgtttcgctgatgcgagccggatgcaccgcggcgatttctcgtccttcctgataagccagcgcaatgatatcagtgatgtaatattcaccctgcgcattattgttagtcagcttagacaaccaacgtttcatgtccgcgccgttggcgatcagaataccggtgttaatttcctgaatctgacgctgttcatcagtggcgtctttatgttcaacgatgccggtcactttaccgttttcacgcgtaatacggccatagccgctcggatcgtccagcttcacggttaataacccaataccaccctgcggtttggcatcgcgcaggcgctgtaaggtttcaaccgaaatcagcggcacgtcgccgtaaagcattaaaatatcttcatcgtcgctaaagaagggcgcggcctgctgcattgcgtgacctgttcccaactgttccgcctgaagcacccagttcagcttgtcatctttcagggtctgttttaacaactcgccaccgtggccatagaccagatgaacctgtgcggcccctaatttagtagctgcatcaatgacatgctgcaccatgggtttacccgccagcgtgtgcagcactttaggaatatcggaatacatgcgtgtgcctttacctgcggcaaggatcactacgctcatagcactatttaacatacgcgtcctgactgtaatttgagaacgaatttatactgtttcacgttgaaaatactacatttttttcatcgtaaaatggaagaaggataaaacgctcaccgggataaaatccccgcctgctaatgaatcattttcgttcattaccgcgcctcttgtctcctgaaaagtaaaaacacccgcgtattggcaacgtagtccgatgtttttgctgtttttttactccataaataaagaagataacgtaataaagcgcaggggagtcagaaaagcaaaaaccagcgacagaggccgctggttttccgttgcgcgtattttttacttaattacgcgacataaaaatccgcaaaatataccagaacatggtcgcgatagaagcaaacagatgtaatgccgcgccagcagggcgatcggtagggtaatggtgaataatgttagaagtatcgtaaagtataaacccggcgcacagcagtaccattagcgcagaaaaccagacgcccagcgagaagccgcagatgacgctggcaataatcgcgccaaaagcaatgaacccagccatagtcagaaacgagcgcagaaaagaaaagtctttttttatagaaaaagcggtaaacgtcaggccgccgaccagcaacagagtcgttattgccgccgcgccaatgctcgacgggttaatatacgccgccaccgttaacaggggggcaaaaatcagggattctgccaacacataaatccccagcccgataagttgcgtttgattattccccgcattatccgccagacgggtcgccagcattcccaccagcataaaagcgccgagaacaaccaaccagctatatcttccaccagccagcagcacatcaagcgcatactccccgacccctataaaactccacgccgcgctcaatacgataaaaccgacgatggcgacggcgagatgaagataagcacgacgaataaaggtagtacgatcaatccttgagtcgggttgtggacccgcaaaggatggctgaaatgacatagtaataatccctcattttatgcaataaaaacgcatccattcctcccttcttcgcacaatgtgcagatgccaatgacagaaagaaggatttaatgaaaacagcgctgtcgctgaaaacgcgtcgccttcagccgcttgtttttgtcgttgctagtttatcgaataaaaattgagaggataaaaaaaaaccagtccgcaatcagactggttttatgctttcaagccggtgttacatcgcttttttggtcaactcgataacgcgcagtttagcgatcgctttggccagttccgcagacgcctgagcgtaatccacgtcaccgtgcgagctcttaatgtgctcttcggctttacgcttcgcttccagggctcgcgcttcgtcgagatcctgaccgcgaatcgcggtatccgccagaacggtcacgctgccaggctgcacttccagaatgccgccggacagatagataaactcttcatgaccgtgctgcttaacgatgcgaatcataccaggcttaatggcggtgagtagcggcgcgtgccccgggtaaatccccagttcgccttcgctacccgtaacctggattttctcgaccagaccggagaacatttgttgctccgcgctgacgacatccaggtggtaagtcattgccatatcaccctccgattaaggcgttaaagttttttggctttttccacggcttcgtcgatggaaccgaccatgtagaacgcctgctccggcaggtgatcgtattcgccttccatgatgcctttaaagccacggatggtgtctttcagggagacgtatttgcccggagaaccggtaaatacttccgccacgaagaacggctgggacaggaagcgctgaattttacgcgcgcgagctaccaccagtttatcttcttcagacagttcatccataccgaggatggcgatgatgtctttcagttcctgataacgctgcaggatggactgaacgccacgcgcggtgtcgtagtgttcctgaccaacaaccagcggatccagctgacggctggtggagtccagcgggtcaacggccgggtagatacccagggatgcgatctgacggctcagtaccacggttgcatctaagtgcgcaaaggtggtggctggagacgggtcagtcaagtcatccgccggtacgtataccgcctgtacggaggtgatagaaccggttttggtggaggtgatacgttcctgcagaacgcccatctcttccgccagagtcggctggtaacctactgcggaaggcatacggcccagcagtgcggatacttccgtaccggccagggtgtaacgatagatgttatcgacgaacagcagtacgtcacgaccttcgtcacggaatttctccgccatggtcagaccggtcaatgcaacgcgcagacggtttcccggcggctcgttcatctggccatacaccagggatactttatcgataacgttggagtcggtcatttcgtggtagaagtcgttaccctcacgagtacgttcccctacgcccgcaaacactgagtaaccggagtgctcgatcgcgatgttacggataagctccatcatgtttacggttttacctacacccgcaccaccgaacagaccgactttaccgcccttcgcgaacggacacatcaggtcgataactttgataccggtttccagcagttcctgagagtttgacaactcttcgtaggaaggcgctgcgcggtgaatcgcccaacgctcttcttcgccgatctcgcctttcatgtcgaccggttcgcccaggacgttcatgatacgacccagcgtagctttacctaccgggacttcgatcgggtgttcgagatcttttacatccagaccgcgacgcagaccgtcagaagaccccatcgcgatggtacgcacaataccgccgccaagctgctgctgaacttccagcaccagcttctcattaccattctgcacctcaagggcatcgtacacgcgtggtacggcatcctgagggaactcgacgtcgaccacggcgccgattacctggacaatctttccagtagccatcttaaatcctctacgaaataacctggttaaaccgcggcggcccccgagacgatctcggtgagttcctgagtaatgctggcctgacgagctttgttgtataccaactgcagctctttaatcaggctgccgccattatcggttgcggctttcatcgccaccattcgtgcggcctgctcgctggccaggttttctaccacgccctgataaacctgagactccacataacgacgcaggagagtatccagcagcgctttcgggtctggttcatacaggtaatcccaggctttacgcttcagatcatcatcttctgacgccggcagcggcagcagttgagtgatcgtcggcacctgagacatggtgttaataaatttgttgctgacaatgtaaagcttgtccagacggccttcgtcgtaggcctgcaacatcactttaaccggaccgatcagttcggacagagaagggttatcccccatacctgtcacctgagcgacaacgttgccgcctacggaattaaagaatgacacgcccttagagccgatcattgcgagttcgcactgaacgcctttatcggaccatgccttcatatccgccagcagctttttgaacaggttaatgttcaagccaccgcacaaaccacggtcggtcgacactaccaggtagcccacgcgtttaacgtcgcgctcttccaggtaggggtgcttatattccagattaccgttcgcaaggtgaccaatcactttgcgcatggtctctgcataaggacggctggccgccatgcgatcctgcgatttacgcattttggaagcggcgaccatctccatcgctttagtgatcttttgcgtgttctggacgcttgcgatcttactacgtatctcttttgcgccggccatgagcttctcctcaatgccttacggcctgccctaaggcaagccgccagacgttaccaggactgggttgctttgaaggaatcgaggatgcctttcagcttgccttcgatttcgtcgttatagccaccggactggttgatctcttgcatcagcggagcgtgatcacggtcgacgtaagccagcagtgcggcttcgaagctaccgattttcgccagttcgacatccgccagataaccacgttctgctgcgaacagaaccagagactgctgcgcgacggacatcggcgcatactgtttctgtttcagcagttcggtcactttctgaccgtggtcaagctgtttacgggtggcatcgtcaaggtcggatgcaaactgagagaacgccgccagttcacgatactgcgccagcgcggtacgaataccaccggacagttttttcatgatcttggtctgggctgcgccacctacacgggataccgagatacccgggttaaccgcaggacggataccggcgttaaacaggttagattccaggaagatctgaccatcggtaatggaaattacgttggtcggaacgaacgcggaaacgtcacctgcctgcgtttcgataatcggcagcgcagtcagtgaaccggttttccctttcacttcacctttagtgaaggcttcgacgtagtcggcgttaacacgcgcagcacgctccagcagacgagagtggaggtagaatacgtcgcccgggaatgcttcacgtcctggcggacgacggagcagcagggagatctgacggtaagcaacagcctgtttagacaggtcatcgtaaatgatcagcgcatcttcgccgcggtcacggaagtattcgcccattgcgcaaccggcatacggcgccagatattgcagcgcagcggattcggacgcggtcgccaccacaacaatggtgttagccagcgcgccgtgctcttccagtttacgcaccacgttagagatggtggacgctttctggccgatagcgacatagatacatttgatgccggagtcgcgctggttgatgatggcgtcgatagccagcgcggttttaccggtctgacggtcaccgatgatcagttcacgctgaccacgaccgattgggatcatggagtcaacggctttatagccggtctgcaccggctgatcgacagactgacgatcgataacgcccggcgcaatcgcttcaacggcagagaagccgtcattatcaaccggacctttaccgtcaattggcgcacccagggtgtttaccacacgtcccagcaggccgcggccaaccggaacttccaggatacgacccgtacatttaaccttcatgccttcggcaaggtcagcgtatggacccatgactaccgcacccacggagtcgcgctccaggttcagtgcgatagcgtaacggttacccggcagggagatcatttcaccctgcatacaatcggccaggccgtgaatgcggataacaccgtcactgacagaaacaatagtaccttcgttgtgagcttcgctcaccacattgaactgagcaatgcgctgcttgatcagttcgctgatttcggtggaattcagttgcatgctccagtccccttaagactgcaagacgtctgcaaggcgctcaagacggccgcgtacgctgccatcaatgaccatatcacccgcccggatgataacgcctgccattacagacttatcgattttgcaattcagcttcactttgcgtgacagacgtttttccatcgcggcgctgattttcgaaagctgctcttcactcaatgcggttgccgacgtaacttctacctcggaggtagcttcactggcggcacgcagatgaataaactgctccagaacatccgggagcgcgttcagacgattattttcagccatcacccgaatcaggttctgaccgttttcgtctaactgctcaccgcagactgcgataaacgactcagcgagcgtttccggcgccagcgcgccagagagaagctctgccatttgttcgttcttggttacctcggcggcaaacgccagcatatcctgccagcgctctacactttggtgttcaacggcaaagtcaaaagctgctttggcgtaggggcgagctaccgtaacaaattcagacatcagcccctccctccttacagttcagcgacaagtttatccacgatgtcgctgttagcagcttcatccacggaacgttcgatgatcttctcggcgccagcaacagccaggatagcaacttgcttacgcagctcttcacgggcgcgtttacgctcggcttcaatttccgcctgcgcctgcgccacgattttagtacgttcctgctctgcttcagttttggcttcgtccaggatctgagcgcggcgtttgtttgcctgctcgatgattacctgagcttccgctttcgcttttttcagctggtcggtcgcgctggcctttgcaaggtcaagatccttatgtgctcgttcagcagaagcgagaccgtcagcaatttctttctgacgtttctcgatggctgccattaacggcggccatacgtacttcatgcaaaaccagacaaagagaataaacgcgatggcctggccgaggattgttgcgttaagattcacagcacaatgcctctatctagttaaccttctgatattgctcttaattcaagcaacgcttactacgcgacagcgaacatcacgtacagacccagacctacagcgatcatcgggatagcatccaccagacccataacgataaagaactgagtacgcagcagaggaatcagatcaggttgacgcgccgcgccttccaggaatttacccccgaggatgccgataccgatcgcagcaccgattgccgccagacccatcatcacagcggcagccatgtacagcagatccatattcaggttttccatgacagtctccagtttgtttcagttaaaacgtagtagtgttggtaaattaatgctcttcggacgccatcgacagatagacaatcgtcagaaccatgaaaatgaaggcttgcagcgtaataatcaggatgtggaaaatggcccacggcacattcagaatccactgtgaccaccacggcaacagaccagcaatcagaatgaaaatcagctcaccggcatacatgttgccgaacagtcgcagaccgagagaaaccggtttggacagcagacttaccccttcaaggattaagttgacaggaatgaacgcccagtgattgaacggctgcagcgtcaactcttttgcgaagccgccgatgcctttcattttgatgctgtagaacagaataaggatgaatacgcccagcgccatcgacagggtgatgttgacgtcagcagacggcaccacgcgcgttgccggcagacccagccaatgctcagcgatatacggcagcaggtcgataggcagtaagtccatcaggttcataaggaatacccagacgaaaatcgtcagggccagcggcgcaatcagcttgcttttgccatggtacatgtctttgacgctgccatgcacaaagccgactatcagctcaatcgcggtctgaaacttgcctggcacgccgctggtcgcttttttagcaacgctacggaacatcaccagaaacaacagacccagcaccaccgagaagaacatggagtcaatattgagcgtccagaaggtggctggggggttctgcggatccaccagcgagaaagtacgcaggtccaactgaaggttattcagatggtgtcctatgtattcctgcggcgtcatattttctgaagccatgatgccttttaccctttgttgttaattacagccggcgccagtatctgaaccaccagcaccaaaacccacgtaacgatcagcggcaaaaacaccgcctttaaaaccgccaacgccaccaccagtaaaaccagcatcgctaacaccttgaaggcttcaccgaaggcgaaagtccaggacacgcggcccttagcaggtgtatgcgcctggtgacgccaggcaaatatcataaacaacatattaggcagtgccactgccaatcccccacatactgcggagatgccccagaaggggtctttgaggcaaaacagcaatccacttgctattaccgccagaaactgaatgaacagaagcttacgagcaacgtttcgactcacgagcgacacagacatcacgtttttactcctgctcacttcgaggtatgccgcgtgtcgtataaaacgttctttaagacttagagtcaagcatcaaaaagcggtcaaattatacggtgcgcccccgtgatttcaaacaataagtagccaaaaggtgaataaatgtttaaatatttttctctggcccgcatttttaacttttagccaaagtgtgaacgatcgtacaaaactgcaaatagcgcgaaaacactggcgataaagcgtgcaccagatcacacattaaacatattcatgcttacgcaattcatttacgtgtcaattcatgccttttcatctttttgatatttaagcgtaaaaccaggtactgttttaaaaataccagcttacaccttaaaaacgccccattgacatttataataaaaatttaacaagcaaaagtgatttttcgattcgatttttagcagactgatatttacaaagttgattactctctgttttaacaaaagaagcgacgttgtcatgttgaaacgaaaccgtaaatccagagttaaatgtaacaacgctgaaatgcgttatacctgtcgatttttaacacaagccgcgtcgttttttttctattttttttgataaaaattaaactttgtttgacttaataatcaccagatgccgctcgccttccagttgcggaacgcgtaatttttcaacagattcgacgctaaaattgtcaggtagtgaggcaatttcatcccctggcaattgcccttttaaggcataaaaacgccctttctctcccggcagatggtggcaccagctcaccatatcattcaacgatgcgaaagcgcggctgataacgccatcaaacggcggttcggagggataggcttcaacgcggctttgaaccggcgtgatgttttccagtttcagttcgtgctggacctgacgcagaaaacgtacccgcttgcccaggctgtcgagtaaggtgaaatgcgcgtcagggagaacaatagccagcgggatgcccggcagccccggtcctgttcctacgtcgataaaacgctgtccctgaagatacggcgcaacgactatgctgtcgagaatatggcgtaccaacatttcgttgggatcccgcactgacgtcaggttgtatgctttgttccatttgtgcagcatatcaacgtaggcgaccagcagcgttttctggtgatcggtaagagaaataccggcatcagccagcagacgagagagtttgttgagcacggtcattacctgttaataatcaaatgcccgatgcgctttcgcttatcgggcctacaaatttgtagggcgggcaagcgaagcgcccccgccaaattagtgttatcaagcgctacgacgcagcataccttgttttttcagccataccagcagaatggagattgccgctggcgtaacgccggagatacgcgatgcctggccgatagacgccggtttatgatcgttcagcttggcgataacttcgttcgacagaccggaaacctgacgataatccagcgtggcaggtagcaacgtattctcgttacgtagttgtttttcaatctcatcctgctggcgagcgatatagccttcgtatttgacctggatttccacctgctcagcggcttgctcatcttcaagcgcaggcgcgaatgcggcaagcgaagtgagctgcgcgtaggtcatttccggacgacgcaacagatcttcgccgctggcctcacgggagagaggcgtggtcaaatgcgcattcacttcatcggcggattccgcagacggcgttacccatgtcgatttcagccgctgacgttcgcgttcgatattttccagcttctcgttgaagcgcgcccagcgttcatcatccaccagacccagctcgcggcccatttcagtcagacgcagatcggcattgtcctcacgtagcatcagacgatattcggcacgggaggtaaacatgcgatacggctctttggtgcccagcgtacagagatcgtccaccagcacgccgagataagcctgagaacgcgcaggcgcccagccctctttgtcggcggaaagacgcgcggcattcagaccagcgagcaagccctgcgccgcagcctcttcatagccggtagtaccgttgatttgaccagcaaagaacaggccgtgaataaatttactttccagagtcggtttcagatcgcgcgggtcgaagaaatcgtactcaatcgcgtaaccagggcgaacgatcttcgcgttctccataccctgcatggaacggacaatctgcatctgcacgtcaaacggcaggctggtggagataccgttagggtaaatctcgttagaggtcagtccttccggctcaaggaagatctgatgctggttacgatcggcaaaacgcatcaccttgtcttcgatcgaaggacagtagcgtgggccgatcccttcgatcacgccagcgtacattgggctacgatcgaggttattacgaatcacgtcatgggttttctcattggtatgcgtgatgtaacacggcacctgttgcggatgctgagaagcattccccataaacgagaaaaccggcatcgggttatcgccatgctgttgagccaacacgctgaaatcgatagtacgcgcatcaatacgcggcggtgtgccggttttcaggcggctgacgcgtagcggaagctcacgcagacggcgagacagcgggatggatggcggatcgccagcacgaccgccgctgtagttatccagaccaatatgaattttgccatccaggaaggttccgacggtcagtaccaccgctttcgcgcggaatttgagccccatttgggtcacggcgccgacaacgcgatcgttttcgacaatcagatcttcaacagcttgctggaagatcatcagattcggctgattctccagcgcggtacgcaccgcctggcggtataagactcgatccgcctgagcccgggtagcgcgaacggccggacctttgctggcgtttagtatcctaaactgaatacctgcctgatcgatcgctttcgccatcagaccgccgagcgcatccacctcttttaccagatgtccctttccaataccgccgatcgccgggttgcagctcatctgtcccaacgtgtcaatattgtgtgtcaaaagcagagtctgttgacccatacgcgctgcggccatcgcggcctcagtgcctgcatgacccccgccaataataatgacgtcaaaaggatcctgataaaacatggtaattgcctcgcataacgcggtgtgaaaatggattgaagcccgggcggtggattctactcaactttagccgatggagaaagccccgggatccgggctattaaaaagaagatctttttatttagagatctgttctattgtgatctcttattaggatcgcgccaggctgtggataacccggatcctgtaataaagatcaatgcgttggaaaggatcactagctgtgaatgatcggtgatcgtggtccgtataagctgggatcaaaacgggtacttatacacaactcaaaaagtgaacaacggttattctttggataactaccggttgatccaagctttccaccagatttatccacaatggatcgcacgatctttacatttatttgagtaaattaatccaggatccgagccaaatctccgctggatcttccggaatctcatgttcaaggatgttgatcttcagtgtttccccaacctgttttgcgccagcgcctttcagttccgcttctattttctcaatcgcgccgcaaaacgtgtcgtattctcgactgccaatgccaattgcgccgaaacgtaccgcggaaagatcgggtttctgcgtctgaaggtcttcatagaaaggggtcaggttgtccggaatgtctccggcaccgtgcgttgagctgattatcagccagatcccggaagttgacagatcctctaataacggaccgtgcaccgtttcggttgaaaaaccggcagcttccagcttttccgccagatgttccgcgacgtattcggcgccgcccagggtgctgccgctgataagagtaatgtctgccattgatcgctcgctcaggtaaagaggctgcattgtactctgtgaacgagctgggatctacctgtggaaaaatgtgggattaaaaaagccgatcatggcttgatggtgcgcatgatcgggttctgcaagacgatcagtgtctcagtggactgaatttcatcaattgtttggatcttgttgataagtacgtgctgaagcgcgtcgattgatttgcacatcacttttataaagatgctgtagtgaccggtggtgtaatacgcttccgtcacctcatccaggctttccagccgggccagtgcggagggatagtctttggcgcttttgaggatgatgccaataaagcagcccacatcgtagcccagttgtttagggctgacgtcaatccgtgcgcccgtaatgatcccggcctgcttcattttctcgacgcgaacgtgaatggttccagggctaacgccaaattgtttggccagttcggcgtaggcggtgcgggcatttcccattaaggcgtcaagtatgccgcggtccagattgtcgatctgataattttccatcgctttttcttatgcagattaatgattatctctattttagccattatttttaacgaatcaaaaccgaagttagctttttatctgttgattattgaatagtgctctcgttttgttgcttaatcataggcaacaggacgcaggagtaaaaaaatgaaaaccgcttacattgccaaacaacgtcaaattagcttcgtgaaatcacatttctctcgccagctggaggagcgtctgggtctgattgaggtccaggcgccgatcctgagtcgcgtaggggatggtacgcaggataatttgtccggctgtgaaaaagcggtgcaggtaaaagtgaaagcattgcctgacgcccagttcgaagtggtgcattcactggcgaagtggaaacgtcaaaccctggggcaacatgacttcagcgcgggcgaagggctgtacacgcacatgaaagcccttcgccccgatgaagaccgactctctccgctccactcggtctatgtggatcagtgggactgggagcgtgtcatgggcgatggcgagcgccaattttccaccctgaaaagcacagtagaggctatatgggcaggaattaaggcgacggaagcagaagtgcataaacagtttggtctggcgccgttcctgccagagcaaattcagtttgttcacagtcaggaactgctggcgcgtttcccggatctggatgcgaaagggcgcgaacgcgcgatcgccaaagaacttggcgccgttttcctggtggggatcggcggtaaactgagcgatggccaccgccatgatgtacgcgcgccggattatgatgactggagctccgcatctgagctgggctacgccggtctgaacggcgatatcctggtgtggaacccggtgctggaagatgcgtttgagctttcctctatgggtatccgcgtagatgccgatacgctgatgcgccagctggcgttgaccggtgatgaagatcgtctgcaactggagtggcatcaggcgctgctgcgcggcgaaatgccgcagaccatcggcggcgggattgggcagtcgcgtctgacgatgttgctgctgcaattgccgcatattggtcaggtacagtgcggcgtatggcccgcgcaggttcgcgaaagcattcctgctattttataagccgttagcgccgccagcgtctcagcaggcggcttcgcatcccggtgtcaaagcgccagatatgatcgaaaatgcgcatgatgccgggtttgccgtgcgccgacatcgccaccgcatggaatcgatgctggtgaagacgctgcaactctcccactttgctcaccacgtcatccggcaagcgctgggcgataaaatccgaaatgaccaccgcatcggcatcaaaccattcccgtccctgcattctttcaataatggcgcgaaaacagctggcgatatccgtgccgccgcgaaaacgttgacttaaaaagcggatggcctgctcgataccttccgggccggagagttcatagcgcacaacgtcagtggaaaacagcataataaagcagcggcggttatccgccagcgcaacgcgcatcaacgccaggcagaacgcttttgcgcactgctcgttaaatcctcccatcgagcctgaagtatcgacgcagacaataaacggtccgcgcggctgctcgtcgacatcctggtgtactaccggccgttcggtcactttctcacgccacgcttcgccatgcaggcgataggtgaggagctgtttttccactaaccggcggtaaaattcatattccagctcggtgatgccgagcgtcgccagctctggcggcaacaggcgcagaatatcatcgccttgctgaataccgtcaacctgctccggcaccgttgcgggttcgcgtaccagtgtacgaaaggtttccatcggcgcgtcttttttcggtaccgatttggcttcccgcgaacgtcccagttgttccgccagttgcattagctccggctgggcggcgagaaattcgccgtattttacgatcagttgataatcaccacgtttaagctggcccgcgctcatatcccacaggcggcctgcggcattatcattttccgccagcgtcggttccagttgcccgctcagcgtcatccgttcctgaacgtcactcagcaactgctcgcgctcttcttccagtagttgttggtttaacgtggtggcctgcacgaccagacttaaccgccagcgttgcaaaaaaagcgtgtgtagcgcaggggtaaaggtactgttgctctccgtcaactgcttcgcctgcgcggcatacggtgaatgcaggcggtgaagcaacgccagtatttgcggcagttgcacgatgaactgtggggtagagagaagttggctttgctgataacacatgacctcttccgtgagttccggcggaacgcgtgcgtctttaagacggctgcgtagcgcttcccgccagcgcgggagatcggcggtcacggcgttttttaaacgcggaaacttttcaaagaaaatgaccagttgtggggaagccagtagcgcgaggatcatctcttcgaccattccctcttcgctgacggccagcatggtatttagcgtatccagcgtcagcattgtttcgcctggcggatctgttctcctacatcctgcaggctggcctcaatgcgccctaaccagtcgctgtgaataaacaggcaatgttgctgttcgctgaagcgggtatgctgctggcgccagtcgttttctaacgtttccagctgctgtttgatctccgcaggcatactgtcttcagccgttcccggtaacgccagacgggtaccttgtagactgatgtcgcgcaccaccagatgttgagcgttatcgacttccatattcagcgtttgggcaaagccgatcccgttcagtttgccgcggatctcgccgcctttggtcagccaaagttccagcgcgctgcggtcaaaggtaatatggatcacttccatatcatgcaatttgagcggtttttgtagcaataacgtcaacgttgacgcactggcttccggcggtaaagtgtaatgcgggcgacggctgaacataccgccttctttaatgacggtgaaggcggttttatcgctttgctgttgctgcaactgaaggcgacgctggacgataccgccgaggcgagtcagcatggcctgctgctgccaggcgtgtccggtcatcaatatttccagttgctgttgcatgagattcagactctgcgcgtcataccacaagcaatcttttagcaggataaggtcaatcggcgcaaccgcgtcgcgtccgctaaagaaggcgctggcctgtaacaggcggatggctttcttccagcgacggtcggagacataaggcgcattcggcaaattatccagctgttggcgcagagtaaatatcagctcaaagaccggatcagggagtgaaatcgcgccgatatccttttgccactgttgatattcttcgtcgctaacctgtaacgaggcaggtaccgggttatcactttcatcctgctgactgaccagcatggagcggaaattggctttatcctgaactttatccagccacaggcgaatcaacattcggtcgtacaacgcttccaggctgctgtccgcttcgggcagttcgttagaggccgccaccagcagccgcatcggaattttttcctcaaatgcgccgttgcggaaatggcgttcgttaatggcggtcagcaatgtgttcaggatagctggcccggctttccagatttcatccagaaaaacgatttcggcttcgggaaggtagccggtcgttaagcgttcatagcgaccttcatctttcagcgcctgaatagagagcgggccaaaaacctcttccggcgtggaaaagcgtgtcatcagatattcaaaagcgcgggcgcgctggaaagcaaacttcaggcggcgggcaatcagactcttggcgataccgggcgggcccaacaaaaagacgctctcaccgcttaacgccgccagtaggcaaaggcgtatggcatgactacgttcatacagccccttctcaagggcgctgctcagacgggaaattctttccgctaataaatgtgggtgagccataataaagaggcgtcctttcgacaaatggatcatgctaattgcgagtatagacgtttcaccaccggggctgtaatcgtctgacgcgctgtttatttttctttgagccaggttaatctggcttcatttaggggtacgattttatgattaatcgtgcatactgtgcgcttttttgtgggccaagggactaagcacacatttcatatctatacactcattcattcaaactacatcaaggcggcaaaggagtgaatcccctggcactgacttaaacgtgtgactggggtaagcgaatgcagccgacaaggaggtagggtgaagggtgacgtgtataaacgaaagatgagtctatgagcactgataataagcaatcgttgcctgcgattaccctcgcagctattggggttgtctacggtgatattggtaccagcccgctttatacgcttcgtgaatgtttgtccggtcagtttggttttggcgttgaacgagatgccgtatttggttttctgtcgctgatcttctggctactcatctttgtggtttccatcaaatatctcaccttcgtgatgcgcgccgataacgcgggtgaaggtggaattttgacgctgatgtcgcttgccgggcgtaatacctcggcgcgcaccacatccatgttagttatcatgggactgataggcggcagctttttctatggcgaagtggtgattacgccggcgatttcggtgatgtcggcgattgaaggcctggagattgtcgcgccgcagctggatacctggattgtcccgctctccattattgtgctgactctgttgtttatgattcagaagcacggtacgggaatggtagggaaactctttgcgccgatcatgctgacctggtttttaatcctggcggtacttggcctgcgcagtattatcgccaatcccgaagtgttacatgcgctgaatcctgtctgggcggtacgttttttccttgaatataaaaccgtatcatttattgcgttgggcgcggtggtgctgtcgattaccggcgtagaggcgttgtacgccgatatgggacacttcggtaagttcccgattcgcctggcgtggtttaccgtggtattgccgtcgttagtactgaactactttggtcagggcgcattgctacttaagcatccggaagcgattaaaaaccccttcttcctgttggcgccggactgggcgttaattccgctgctgattctggccgcgctggcgacggtgatcgcctcccaggcggtcatttccggcgtcttttcgctgacgcgtcaggccgtgcgtcttggctatttgtcgccaatgcgcattatccatacctccgagatggagtccggtcagatctatatccctttcgttaactggctgctttatttcgcggtcgtggttgttattgttagctttgagcactccagcaacctggcggcggcctatggtatcgccgtgaccggcacgatggtgctgacgtctattctttctacgaccgtggcgcgtaagaactggcactggaacaaatattttgtcgcgctgatcctcatcgcattcctgtgcgtggatatcccgctgttctcggctaacctcgataaattgttgtccggcggttggctgccgctgagcctgggtctgatcatgttcacgatcatgaccacctggaagagcgagcgtttccgtctgttgcgtcgtatgcatgaacacggtaattcgctggaagcgatgattgcttcactggagaagtcaccgccggttcgggtgccgggtactgccgtatacatgtcgcgcgcgctcagtgtgatcccttttgctttattgcataacctgaagcacaacaaagtgttgcatgagcgcgtaatcttactgacgttgcgtacggaagatgcgccttatgtgcataacgttcgccgggtgcagattgagcagttgtctccgacattctggcgcgtggtggccagctacggctggcgcgaaacgccaaacgttgaagaggtgttccaccgctgcggtctggaaggccttagctgtcggatgatggaaacgtcgttctttatgtcgcacgagtcgttgattgtcggcaaacgcccgtggtatttgcgtctgcgtggcaagctgtatttgttgttgcaacgcaacgccctgcgcgcgccggatcagttcgagatcccgcctaaccgcgtgattgagttaggtacgcaggtcgagatttaacctcccatcaacatgccgggggccgcgttggcttacccggcctggccaatccgtagattcccacaagataatcgcctgatttccgctagcgaaacgtttcgacggcgatcacaattctgttacgtcatgatggttttatgaacacatccggggttacactgcggccagcgaaacgtttcgctagtggagcagaaaaatgaagaaaggcaccgtactcaactctgaaatctcgtcggtcatttcccgtctggggcatactgatactctggtagtctgtgatgcgggtttacccatcccgaatagcaccgcgcgtatcgatatggcactaacccagggcgtaccttcttttatgcaggtggtggatgtcgtgacccgggaaatgcaggttgaggcggcgattcttgcaacggaaatcaaacaacagaatccgcagctccacgaaacgttgctcactcaccttgagcaactgcagcaacaccagggaaacaccataaaaattagttatacgacacacgaacaattcaaaaaattgactgcagacagtcaggcggtgattcgcagcggggagtgttccccgtatgcgaacgtcattctttgcgctggcgtcactttctgaggccgctatggacgcattactgcaactcaaagggatcgataaagcgttccccggcgtgaaggctctctccggcgccgcgttaaacgtttatcctggccgcgttatggcgctggtgggggaaaacggcgccggaaaatccaccatgatgaaagtattaaccggcatctatacgcgagatgcgggatcgttgttatggctgggtaaagagaccacctttaatgggcctaaatcgtctcaggaagccgggatcggcattattcatcaggaactgaacctgatcccgcagttgaccattgcggaaaacatcttcctgggccgtgagtttgtgaatcgctttggcaaaatcgactggaaaaagatgtatgccgaagccgaccacctcttagccaaactcaatctgcgttttaagagcgataagctggtgggcgaactctctatcggcgatcagcaaatggtggaaatcgccaaagtgctgagcttcgaatccaaagtcatcattatggatgaaccgaccgatgcgctgaccgacactgaaaccgactctctgttccgcgttatccgcgaattaaaatcgcaggggcgcggcattgtctatatctcccaccgtatgaaagagatcttcgaaatttgcgatgacgtgacggtcttccgcgatgggcaatttatcgccgagcgtgaagtggccacgttgaccgaagattctcttatcgaaatgatggtgggacgtaagctggaagatcagtacccgcatctggataacgcgccgggtgagattcgcctcaaggtcgataatctgtgcggaccgggcgtgaatgatgtctcttttgtgctgcgaaaaggcgagattcttggcatctccggcctgatgggcgccggtcgcaccgagctgatgaaagtattgtacggcgcgatgccgcgaaccagcggttatgtgacgctcgatggacacgaagtggtgacgcgctctccgcaggacgggctggccaatggcatcgtttatatctctgaagaccgtaagcgcgatggactggtgctcggcatgtcagttaaagagaatatgtcgctgacggcgctggactatttcagccgcgctggcggaagcctgaaacacaaagatgagcagcaggcggtgggggattttatccgtctgttcaacgtcaagacgccttcaatggaacaggcgataggcctgctttccggtggtaatcagcaaaaagtggcgattgcccgcgggttgatgacgcgcccgaaagtgctcattctcgacgagccgacccgcggcgtggacgtcggcgccaagaaagagatttaccagcttatcaaccagtttaaggccgacggcctgagcatcattctggtctcatctgagatgccagaagtattaggcatgagcgatcgcatcatcgtcatgcatgaagggcatctcagcggtgaatttactcgcgagcaggccacccaggaagtgttaatggctgccgcagtgggcaagcttaatcgcgtgaatcaggagtaaaaaagatgacaacccaggctgtttctggtcgccgttatttcactaaagcgtggcttcttgagcagaagtcgctcattgccctgctggtgttgatcgcgattgtttcgacgttgagccccaacttttttaccgttaataatctgttcaatattcttcaacagacctccgttaacgccattatggcggtggggatgacgttggtgattctgacatcggggatcgatctgtccgtcggttccctgctggcgctcaccggtgcggttgccgcttcaatcgtcggcgttgaagtgaatgcgctggtcgcggttgccgccgcgctggcgctgggcgctgcgattggcgccgtcactggcgttatcgtcgcgaagggccgcgtacaggcgtttatcgctacgctggtgatgatgctgctactgcgtggcgtgacgatggtttacaccgacggtagcccggtcaacaccggctttaccgataacgccgatctgtttggctggttcggtatcggtcgtccgctgggcgttcctacgccggtctggatcatggctatcgtctttatcgccgcctggtatatgctgcatcacactcgtctgggacgctatatctacgcgctgggcggtaacgaagcggcgacgcgtctgtctggcattagcgtgagcaaagtgaaaattatcgtctattcactttgcggcctgacagcatcgctggcgggcatcattgaagtggcgcgcctctcttccgcgcagccgacggcgggtaccggctatgagctggatgctattgccgccgtggtgctgggcggcaccagccttgcaggtggtaaagggcgcattgttgggacattgatcggcgcattgattctcggcttccttaataatggtttgaatttgttaggtgtttcctcctattaccagatgatcgtcaaagcggtggtgattttgctggcggtactggtagacaacaaaaagcagtaacaacgactacaggacatctgaaatatgaacatgaaaaaactggctaccctggtatctgctgttgcgctgagcgccaccgtgagcgcgaatgcaatggcgaaagacaccattgcgctggtgatctctaccctcaataatcccttcttcgtgtcgttaaaagacggggcgcaaaaagaggcggataaactgggttataacctggtggtgctggactcccagaacaaccctgccaaagagctggcgaacgtgcaggatttaaccgttcgcgggaccaaaattctgctgatcaacccgactgactccgatgcggtgggtaacgcggtgaagatggcgaaccaggcgaagattccggttatcacgcttgaccgccaggcaaccaaaggcgatgtcgtcagccatatcgcgtctgataacgtgctgggcggtaagatcgctggcgactatatcgcgaaaaaagctggcgaaggcgccaaagtgattgagttgcaaggcattgccggaacatctgcggcgcgtgagcgtggcgaaggtttccagcaggcggtagccgcccacaaatttaatgtcctggccagccagcctgctgatttcgaccgtactaagggtctgaacgtcatgcagaacctgctaaccgcgcatccggatgttcaggctgtcttcgcccagaacgatgaaatggcgctgggcgcactgcgcgcactgcaaactgccggtaaagcagatgtgatggtggttggatttgacggtacgccggatggcgaaaaggccgtaaaagatggcaaactggcagcgactatcgctcagttaccggatcaaatcggcgccaaaggcgttgaagtggcggataaggtgttgaaaggcgaaaaagttcaggccaaatatccggttgacctgaaactggtcatcaagcagtaataaacgacacgggtcaactatggcctgatggcgacagaaatacgcgagcctccgctgaggtgaacgtaaaaaaaagaaaagcagggcacgcgccaccctaaccggtggcgcactttgacgtggaaccccgaatatgaaaaccgcaggtaatctcatcgtccttggcagcattaatgccgatcatatccttaatcttgagtccttccctaccccgggtgaaacggtaaccggtagccattatcaggtcgcgtttggtgggaaaggcgcgaatcaggcggttgctgcgggacgtagcggggcaaatattgcgtttatcgcctgcacgggcgatgacgatattggcgacagtattcgtaaacaattagtcagcgatcgtattgatatcgcgccagttagcgttattaaaggcgagtctaccggggtggcgctgattttcgttaatggcgaaggcgagaacgtcatcggtattcatgccggagcgaatgccgcgttatcgccggcgttggttgatgcgcagcgtgaacgtatcgcgcaggcggatgcgttactgatgcaactggaatcgccgctggaaagcgtactggcggcggcgaaaatcgcccatcaacatcatactactgttgcgcttaatccggcgcctgcccgtgagttaccggatgaactgctggcgctggtggacatcatcacgccaaatgaaacggaagctgaaaagctgacgggcgtgcgtgtggaaaatgacgacgatgccgcgaaagctgcgcaggttttgcatgataaaggcattcgaaccgtattaattaccttaggaagccgtggcgtctgggccagcgtagacggcgagggccgccgcgttcctggatttagcgttgaggctgtcgataccattgctgccggagatacgtttaacggcgcctttatcaccgcgatactggaggagacgccgttgccggaagcgattcgctttgcccatgccgccgccgcgattgccgtaacgcgtaaaggcgcgcaaccttccgttccgtggcgcgaagagatagaagcgtttttacatcagcaggggtaacgcttggctactatgaaagatgttgcccgcctggcgggagtctctacatcgacggtctctcacgttattaacaaagatcgctttgtgagtgagacgataaccgaaaaagttgaagcggcgattaaatcgctcaactatgcgccttctgcgctggcgcgaagcctcaagttaaaccagacccgcacgattggtatgctaattaccgccagtaccaaccctttttattccgaactggtgcgcggcgttgagcgaagctgttttgagcgcggttatagtctggtgctgtgcaataccgaaggcgacgagcaacggatgaaccgcaacctggagacgctgatgcaaaaacgggtagacggtttactgctgctgtgtaccgaaacgcatcagccttctcgtgaaatcatggagcgttatccgtctattcctaccgtcatgatggactggtcgccgtttgatggtgagggcgatagcgatctcattcaggataattcgttgctaggcggcgatcttgctacccaataccttatcgataaaggatttacccgaatagcctgtattaccggcccgctggacaaaacgccagcgcgtttacggctggaagggtatcgggcggcgatgaaacgcgcagggctggctattccgcaaggctatgagatcaccggcgattttgaatttggcggcggctttgacgccatgcaggcgttactcgcccatcaacagcgaccgcaagcggtttttaccggaaacgatgcgatggctgtcggcgcctatcaggcgctatatcaggcggggcttcgtattccgcaggatatggcagtcattggctatgatgatattgagctggcgcgctatatgacgccgccgctgacgactatccatcagccgaaagatgaattgggcgagctggctattgatgtgttgattcatcggatggcgcagcccgccttgcaacaacagcgacttcagcttactccggttttgacggtgcgtgggtcggtttagatttatgccgttctttaatcagattgttgccgtctttggctcttagcagcataaacatcagcgcggacacgatagtgatcgcccccatcgtgataaaggtatagtggaactgttccacggtactggtgcccgcaaaaccttcataaatacgtaacaccgccgcgctgatcgccacgcctaaactgatagacaattgctgcgtaaccgccagaacgctgttgccgctgctggcattatcgtccgtcagatccgcaagagtaatcgtattcattgccgtaaattgagtggacatcgccattccaagaatgaatagcggcagcacgagcatccagatcggcatggcgggagattgaaacgaaaactgggcaatcatcagaccgataaataccgtaatgccgaccagagtcttccggtatcccaaacgtcgtaaaacctgcgttacggtcgatttcgcgataatagaacccaaagccgtcggcgccatcatgcagccggcgatcagagccgggtagccaaaaccaacctgtagcattaacggcatcaaaaaaggtacgcagcctgtccccagacgcgtggcgaggttgccggcaataccgacggaaaatgtgcgtgtcttaaacagcgatagtgatattaacggtgtcggatgacggcgggcgtggcggatataggccaatagtagaacgatactgcaaaaaataatggcggatgcgatccatgtcgccacaatcttttcgccaaacagttccattccgctggaaaataaaaccagacttaacccaaaaagaaagaagccggtcatgtcaaacttgcgacgcggcgtggtgaagttgggcatatatttgcgggcatacagaatgcctgcaacaccaatgggaatattaatcaggaagatccagtgccagcttgcccaggtcaccagtacgccgcctaataccggccccagaatcggacctaccagccccggcatagtgacaaagttaagaacgggcagcagctcactacgcggataggctcgcaataacgccagccgcgccactggcatcatcatcgctccgccgacgccttgtacgacgcgaaaaataaccaattcagatagtgaactggagagcgcgcaggccagcgagcctaacgtaaacagacttacggcaaccataaaaacgcgacgcgtaccaaagcggtcagccagccagccgcttaccggaattaacatagctactgtcagggtataactgataatagcggactgcatggcgagtggtgaacggttaagactatgcgcaatagccggtaaagcggtattcaaaatggtggcgtctagcgcctgcataaagaaggccatcgccgcgatccacggcaggccagccatactgcgcgcttttttgctggtcattcaatatcctgttaattatctggtctctcattgggcgctattaacaacgcctggcaggcctggaaagcgcgttcgccgtcgccatcagcgatggcatcaacaatggcctggtgcaaatccagctttaccacctcgttataggtgattgaggtaaagtaagtgtgataaaccgaatgaaatagcgtcgcaaaagagattagaaagggattggcgctcatttcgtagatatgctcgtgccacgccatatccacttcaatccagcgttcacgcttaaaatgctttttcagcgcgaccatctcttccattaaggcattaagccgcgctttctgctccggtgtgccaagagtcgccgccagcaggcaggcttgcggctccaggctaatacgcatcaccagaaaatgctctaccacctgatgaaaattttcttccgtcatccaccaggtcagcagctcttgatccagaaagttccagtttccctgcggcatcacccgcgtaccaatgcgcggacgaggtagcaccatacctttagccgtcaacgttttcaccgcttcgcgaactgccgttcgacttacgccgtactgctcgcccagttctatttcgccgggaagaatcgtaccgggggcgtagtcaccctttaatatccgctgcgccagcttttcagccagaacataggatagatttttctgtgcggctaattgttgtgcgcttaaaggcatgaatgttcttcctttctctttcgtttggttattagtatgccacctggaagtgtgattgcagttgcaataacggcaatttgcttattttatggcacgttaagcacgctattgatgaaaaaagagacactcagaaaattattttaaatttcctcttgtcaggcagaaataactccctataatgcgccaccactgacacggaacaacggcacacaggccgccgggtcagcggggttcagaccagaacctcacggagaaaagcgaaaataaacgcttgactctgaagcgggaaagcgtaatatgcacaccccgcgccgctgagaaaaagcgaagcggcactgctctttaacaatttatcagacaatctgtgtgggcactcgaagatacggattcttaacgtcctaggacgaaaaatgaataccaagtctcaagagtgaacacgtaattcattacgaagtttaattcattgagcatcaaacttttaaattgaagagtttgatcatggctcagattgaacgctggcggcaggcctaacacatgcaagtcgaacggtaacaggaagcagcttgctgcttcgctgacgagtggcggacgggtgagtaatgtctgggaaactgcctgatggagggggataactactggaaacggtggctaataccgcataacgtcgcaagaccaaagagggggaccttcgggcctcttgccatcagatgtgcccagatgggattagcttgttggtgaggtaacggctcaccaaggcgacgatccctagctggtctgagaggatgaccagccacactggaactgagacacggtccagactcctacgggaggcagcagtggggaatattgcacaatgggcgcaagcctgatgcagccatgccgcgtgtatgaagaaggccttcgggttgtaaagtactttcagcggggaggaaggtgttgtggttaataaccgcagcaattgacgttacccgcagaagaagcaccggctaactccgtgccagcagccgcggtaatacggagggtgcaagcgttaatcggaattactgggcgtaaagcgcacgcaggcggtctgtcaagtcggatgtgaaatccccgggctcaacctgggaactgcattcgaaactggcaggcttgagtcttgtagaggggggtagaattccaggtgtagcggtgaaatgcgtagagatctggaggaataccggtggcgaaggcggccccctggacaaagactgacgctcaggtgcgaaagcgtggggagcaaacaggattagataccctggtagtccacgccgtaaacgatgtctacttggaggttgtgcccttgaggcgtggcttccggagctaacgcgttaagtagaccgcctggggagtacggccgcaaggttaaaactcaaatgaattgacgggggcccgcacaagcggtggagcatgtggtttaattcgatgcaacgcgaagaaccttacctggtcttgacatccacagaagaatccagagatggatttgtgccttcgggaactgtgagacaggtgctgcatggctgtcgtcagctcgtgttgtgaaatgttgggttaagtcccgcaacgagcgcaacccttatcctttgttgccagcgattaggtcgggaactcaaaggagactgccagtgataaactggaggaaggtggggatgacgtcaagtcatcatggcccttacgaccagggctacacacgtgctacaatggcgcatacaaagagaagcgacctcgcgagagcaagcggacctcataaagtgcgtcgtagtccggattggagtctgcaactcgactccatgaagtcggaatcgctagtaatcgtggatcagaatgccacggtgaatacgttcccgggccttgtacacaccgcccgtcacaccatgggagtgggttgcaaaagaagtaggtagcttaaccttcgggagggcgcttaccactttgtgattcatgactggggtgaagtcgtaacaaggtaaccgtaggggaacctgcggttggatcacctccttaccttaaagaactgttctttgcagtgctcacacagattgtctgatgaaaagtaaatagcaaggcgtcttgcgaagcagactgatacgtccccttcgtctagaggcccaggacaccgccctttcacggcggtaacaggggttcgaatcccctaggggacgccacttgctggtttgtgagtgaaagtcacctgccttaatatctcaaaactgacttacgagtcacgtttgagatatttgctctttaaaaatctggatcaagctgaaaattgaaacacagaacaacgaaagttgttcgtgagtctctcaaattttcgcaacacgacgatgaatcgaaagaaacatcttcgggttgtgaggttaagcgactaagcgtacacggtggatgccctggcagtcagaggcgatgaagggcgtgctaatctgcgataagcgccggtaaggtgatatgaaccgttataaccggcgatacccgaatggggaaacccagtgtgattcgtcacactatcattaactgaatccataggttaatgaggcgaaccgggggaactgaaacatctaagtaccccgaggaaaagaaatcaaccgagattcccccagtagcggcgagcgaacggggaggagcccagagcctgaatcagcatgtgtgttagtggaagcgtctggaaaggcgcgcgatacagggtgacagccccgtacacaaaagcgcatgtgctgtgagctcgatgagtagggcgggacacgtggtatcctgtctgaatatggggggaccatcctccaaggctaaatactcctgactgaccgatagtgaaccagtaccgtgagggaaaggcgaaaagaaccccggcgaggggagtgaaaaagaacctgaaaccgtgtacgtacaagcagtgggagcacccttcggggtgtgactgcgtaccttttgtataatgggtcagcgacttatattctgtagcaaggttaaccgtataggggagccggagggaaaccgagtcttaaccgggcgttaagttgcagggtatagacccgaaacccggtgatctagccatgggcaggttgaaggttgggtaacactaactggaggaccgaaccgactaatgttgaaaaattagcggatgacctgtggctgggggtgaaaggccaatcaaaccgggagatagctggttctccccgaaagctatttaggtagcgcctcgtgaattcatctccgggggtagagcactgtttcggctagggggccatcccggcttaccaacccgatgcaaactgcgaataccggagaatgttatcacgggagacacacggcgggtgctaacgtccgtcgtgaagagggaaacaacccagaccgccagctaaggtcccaaagtcatggttaagtgggaaacgatgtgggaaggcccagacagccaggatgttggcttagaagcagccatcatttaaagaaagcgtaatagctcactggtcgagtcggcctgcgcggaagatgtaacggggctaaaccatgcaccgaagctgcggcagcgaacgtatcacccaagacaactttacggagttgacgattgacggagcgaagcgacgtcaaagcgttcattaaagtcgagttggcttagggatacgttcgttgggtaggggagcgttctgtaagcctgtgaaggtgtgtcgtgaggcatgctggaggtatcagaagtgcgaatgctgacataagtaacgataaagcgggtgaaaagcccgctcgccggaagaccaagggttcctgtccaacgttaatcggggcagggtgagtcgacccctaaggcgaggccgaaaggcgtagtcgatgggaaacgggttaatattcccgtacttggtgttactgcgaaggggggacggagaaggctatgttggccgggcgacggttgtcccggtttaagcgtgtaggtgtgtgttccaggtaaatccggttcactttaacactgaggcgtgacgacgaggcactacggtgctgaagcaacaaatgccctgcttccaggaaaagcctctaagcatcaggtaacatcaaatcgtaccccaaaccgacacaggtggtcaggtagagaataccaaggcgcttgagagaactcgggtgaaggaactaggcaaaatggtgccgtaacttcgggagaaggcacgctgacacgtaggtgaagtgatttactcatggagctgaagtcagtcgaagataccagctggctgcaactgtttattaaaaacacagcactgtgcaaacacgaaagtggacgtatacggtgtgacgcctgcccggtgccggaaggttaattgatggggtcagcgcaagcgaagctcctgatcgaagccccggtaaacggcggccgtaactataacggtcctaaggtagcgaaattccttgtcgggtaagttccgacctgcacgaatggcgtaatgatggccaggctgtctccacccgagactcagtgaaattgaactcgctgtgaagatgcagtgtacccgcggcaagacggaaagaccccgtgaacctttactatagcttgacactgaacattgagccttgatgtgtaggataggtgggaggctttgaagtgtggacgccagtctgcatggagccgaccttgaaataccaccctttaatgtttgatgttctaacgtggacccgttacccgggttgcggacagtgtctggtgggtagtttgactggggcggtctcctcctaaagagtaacggaggagcacgaaggttggctaatcctggtcggacatcaggaggttagtgcaatggcataagccagcttgactgcgagcgtgacggcgcgagcaggtgcgaaagcaggtcatagtgatccggtggttctgaatggaagggccatcgctcaacggataaaaggtactccggggataacaggctgataccgcccaagagttcatatcgacggcggtgtttggcacctcgatgtcggctcatcacatcctggggctgaagtaggtcccaagggtatggctgttcgccatttaaagtggtacgcgagctgggtttagaacgtcgtgagacagttcggtccctatctgccgtgggcgctggagaactgaggggggctgctcctagtacgagaggaccggagtggacgcatcactggtgttcgggttgtcatgccaatggcactgcccggtagctaaatgcggaagagataagtgctgaaagcatctaagcacgaaacttgccccgagatgagttctccctgagacttagagtctcctgaaggaacgttgaagacgacgacgttgataggccgggtgtgtaagcgcagcgatgcgttgagctaaccggtactaatgaaccgtgaggcttaaccttacaacgccgaagatgttttggcggttaagagaagattttcagcactgattcagattacatcagaacgtaaaaacggtctgataacagaatttgcctggcggcactagcgcggtggtcccacctgaccccatgccgaactcagaagtgaaacgccgtagcgccgatggtagtgtggggtctccccatgcgagagtagggaactgccaggcatcaaattaagcagtaaactgatgtaaaaatcagtggttgtaaaagaattcggtggagcggtagttcagttggttagaatacctgcctgtcacgcagggggtcgcgggttcgagtcccgtccgttccgccaccctaattaggggcgtagttcaattggtagagcaccggtctccaaaaccgggtgttgggagttcgagtctctccgcccctgccagaaataatccttagcatctgctaaggatttttttttgcctaaaattacctgattatctgatcaggtaatcgtaagttcccttctttttcttttcatcattttcattgttcatccagcacatccgtttttaacagatcgcagatcagcgagtatttatcgctgttttgcagccaaatagcgtatagtggccgtgaaagcgttgcgctgtcggcaacggtatgtaatccgcccttttcatttgcccagtttacaggaagccagctacagccatttaatgcgctaagctgctgtcgggcgagttcggctgagctggttgttaataccggcacttcatctgctgcgatcagccctgtttcatgctgttggaagtctggtccccactccagccgcagataattgagttctgatttcttacgggcagggctgctgcaatataacgccaaagtgaagtgccctaacagctgactgctgaactcatccattttgggcgcttcggtagtaatgaggagatcaagctggcgttcatgaagttgcttcacaagcgattgccgttgagcgattctggcttcgaactgcaggccgctttgcggctcctgtagttggtacagtcgccccagccaggcgttaagcatacactcccataaagacgcgctggcgccgatggaaaactcgttatggcgtgaggtatgcgccacctctttacgtgccgcctgccacgtattcatcagcgtttccgcatacggtaaaagtttttcgccagccgtggttaaacggatattgtttctgtgccgcgtaaaaaggtttacgcccagttgattctccagttgcctgatacgaaagctcaccgcggattgcgtcaggtaaagtgcttctgcggcccgcccgaaatggcgtgtccggctaacttccaggaaagtttttaacaattccgtatccactgtgctctccacaaaattatttgtcgttatgatttaaatgttttgttttacactctgtcaagcgtaactaatactccgcgccataaatagctcagacaaagaattaggagcgtgcaggatggcggaaagctttacgacgactaatcgatattttgacaataaacattatccacgtggattctctcgtcacggtgatttcacgattaaagaggcacaactgcttgagcgtcatggtcatgcctttaatgatctggatcttggcaagcgtgagcctgtgactgaagaagagaagctgtttgtagcggtatgtcgcggtgaacgcgagccggtaacggatgcagaacgcgtctggtccaagtatatgacgcgtatcaagcgtccaaaacgcttccacaccttgtctggcggcaagccgcaagttgaaggcgcagaagactacaccgaagctgatgattaataaaaagggcgtaatgccctttttttacgccaacagcttttgcaaatgaattaacaacctgtctatcgcccgatagcttaccgcctcctgcaaatgctgacgcgagatctggtcagccagttctatgtcggcaatggttctggcaacttttagtaaacgctgccaggcgcgaatggataatccaagatgcaccagcgtgtcttcaagccagcgggcgtcatcgtgatgcaaaacacaatatttttggatttcgcgaccctccagacgcgcgtttaacttcttctggcgtcggtactgccgttcatgggcggcgatgacccgcttttttaccgtagcgctgctctcaccctttgaggcgtgttggctaagaatcccgggcggtggaagcggtatctcaagcgaaaggtcaaaacgatcaagaaacgggcctgacaaccgattaaggtaacgtagtgtctgttctggcgtgcagcgattatggtttccctgataatgtccggtcgggctgggattcattgcggcgattaactggaacctggcagggtacgttattttcgctctggtacgggataaatgaatttgaccggattctataggttcacgtagcgcatccagtgtgcgtcgttcaaattcaggcaattcatcaaggaacaaaattccgttgtgcgccagcgatatctctcccggggcgggtattgcgccgccgccgaccatagcagtaagtgaggcgctatgatgaggtgagcgaaaggggcgttgctgccatcgtttttgtaccgtatcggcattaaccagactgaggatcgcggcgctttccaacgcctcctcattgcttaatggtggaagaatcccgctcagtcgactggccagcatggttttacccgtacccggcgggccgatcaatagcagattatgtccccctgccgctgtaatctccaggccgcgtttaccctgctcctgaccgatcacatcgcgaagatcggcagttgcggtaggcgatgccatatcctgagctaaaggtctttccagggcgtgtttcccttccagaaaggcgcagacggtttgtagatgatcggcgataaaacatccttctttgcttataagcccaacctccgccgcgttctctgttgcgacgataatatttctgccggccctgatggcttccgttgcacttgatattgcgccaggaacgccgcgtaatgcgcctgtaagcgctaactcacccaccagctcatatgcctcaagattcgacgctgtaagctgctcagacgcggccagaagcgcaacagcaataggcaggtcataccttccaccctctttcggtagatcggctggagcaaggttaatggttatttttttagccggaaattcatatccgctattaataatcgcactacgtacccggtcacgcgcctcttttaccgtggtttccggtaggccaaccatggttaatcccggtaatccattactgatatgcacctctatagtgataggcggcgcattgacgccaagtgcggcgcgggtatgaacaatcgccagtgacataatccctcctgttacgtggattatgcggaatagaagagaaaatcgaattactgactttttgttttttagcgactgcttcctgaattttggcgtcattttcaggtaagaaacatcaaactggaagaacgctcgcagaagcgaaaagaaggaaaacaggatgtagagtgcgccaaaagggggaggaaaacgtgaaaatttttcagttgctaatttttcttataaaaaacaaagtacttttaggcattcacctgcattatctgaaacgtggttaaaaaaatatcttgtgctattggcaaaacctatggtaactctttaggtattccttcgaacaagatgcaagaatagacaaaaatgacagcccttctacgagtgattagcctggtcgtgattagcgtggtggtgattattatcccaccgtgcggggctgcacttggacgaggaaaggcttagaaatcaagccttaacgaactaagacccccgcaccgaaaggtccgggggttttttttggcctgaaaaacttaagcgaggagcagagcgtgaataacagcataaaattctgtttctcaagatttacgacggggatgtaactatgaacggggcacagtgggtggtacatgctttgcgagcgcagggggtgaaaaccgtatttggttatcctggcggcgcaattatgccggtttacgacgcgttgtatgacggtggtgtggagcatttgttgtgccgacacgagcagggtgcggcaatggcggcaatcggttatgcccgttctaccggcaaaaccggtgtttgtatcgccacttccggccctggcgccactaacctgatcactggcctggcggatgcgttgttagattcggtccccgtcgtcgcgatcacgggtcaggtttccgccccgttcatcggcaccgatgcgttccaggaggtggatgtgttagggctgtcgctggcctgtaccaaacacagcttcctggtgcagtcgctggaagagttgccgcgcatcatggcggaggcttttgaagtcgccaacgctggccgtcctggcccggttctggtggatatcccgaaagatatccagttggccagcggtgagctggaaccctggtttactaccgttgctaacgaagcgactttcccgcaggctgatgtggaacaggcgcgccagatgctggaacaggcgaaaaaacccatgctgtacgtcggcggtggtgttggtatggcgcaggcagttccggcgctgcgtaaatttatcgcggtaacgcaaatgccagttacctgcacgctgaaagggctgggggctgttgaagctgattatccgtactatctgggcatgctgggaatgcacggtactaaagcggctaatttcgcggtgcaagagtgtgatttactgatcgcagtgggtgcacgttttgatgaccgggtgaccggtaagctgaatacgtttgcgccgaacgccagcgtaatccatatggatatcgacccggcggaaatgaacaaactgcgtcaggcacacgtcgcgttgcagggcgatttaaattcgctgttgccggcattacagcaaccgctgaagatcgacgcatggcgtcagtcctgtgcagagctgcgcgcagaacacgcctggcgctatgaccatcctggcgagactatctatgcgccgttgttgttgaagcaattgtcggaacgcaaacccgcagacagcgtggtgacgacggatgtggggcagcatcagatgtggtcagcccagcatatgacttacacccgcccggagaacttcatcacctccagcggtctggggacgatgggattcggcttaccggcggccgttggcgcgcaggtagcgcgaccgaatgataccgttatctgtatctccggtgacggctccttcatgatgaatgttcaggagttgggcaccgtaaaacgcaagcagttaccgttgaagatagtcttactcgacaaccagcggttagggatggttcgacaatggcagcaactgtttttccaggagcgatatagcgaaaccaccctgaccgataaccccgatttcctcatgctggccagcgccttcggcattccaggccagcacattactcgtaaagaccaggttgaagcggcactcgacacgatgttggcaagcgaagggccgtacctgcttcacgtctcaatcgacgaacttgaaaatgtctggccgttggtgccgcctggcgccagtaactctgaaatgctggagaaattatcatgatgcaacatcaggtcaatgtatcggcacgctttaatccagaaaccttagaacgtgttttacgcgtggtgcgccatcgtggttttcaggtgtgctccatgaatatggaagccgcgaccgatgcgcagaatataaatattgaattgaccgttgccagtccccggtcggtcgacttactgtttagtcagttaagtaaactggtagatgttgcgcatgtcgcgatctgccagagcgctgccacatcacaacaaatccgcgcctgagcgcaaaaggaagaaaaatgacgacgaaaaaagctgattatatttggttcaatggcgagatggtgcgctgggaagacgcgaaggttcacgtaatgtctcacgcgctgcactacggtacgtcggtatttgaagggattcggtgctacgactctcacaaaggtccggtagtgtttcgtcatcgtgaacatatgcagcgcctgcgcgactcagcaaaaatttatcgttttccggtttcccagagcattgatgagctgatggaagcctgccgcgacgtaattcgtaaaaataatctgaccagcgcctatatccgtccgttggtatttgtcggcgatgtcggtatgggcgttaacccgcccccgggatacaccactgacgtcatcatcgccgcgttcccgtggggggcatacctgggcgccgaagcgctggatcaggggatcgatgcgatggtttcttcctggaaccgcgctgcgccgaacaccattccgaccgccgccaaagcgggcgggaactatctttcctcactgctggtgggtagcgaagcgcgccgccacggctatcaggaaggcatcgccctggatgtaaacggctatatctccgaaggcgcaggtgaaaacctgtttgaggtaaaagatggcgtgctgtttactccgccgtttacctcttccgcgctgccaggcattactcgcgacgcgattatcaaactggcgaaagagctgggtattgaagtgcgcgagcaggtgctgtcccgtgaatcgctgtatctggccgacgaagtgtttatgtccggaaccgcggcagaaattactccggtacgcagcgttgatggtatccaggtaggtgaaggccgttgcggccctgttaccaagcgtattcaacaagccttctttggtctcttcactggagaaaccgaggataaatggggctggttggatccggtaaattcataataaataaaattaatattttcccaaaataatttgcgtcacaggaaggcggtaacgcagcgaatccccagaagcttactgtagtaagtgactggggtgagtgaggcagccaacgcacctgtggcgtgaagtatgaagggaaaagatggggagtaaataaagcatgcctaagtaccgttccgccaccaccactcatggtcgtaatatggcgggtgcccgcgcgctgtggcgcgccaccggaatgaccgacagtgattttggcaaaccgattatcgccgtggtgaactcattcactcagtttgtgccgggtcacgttcatctgcgcgatctcggtaagctggtcgccgaacagattgaagcttccggcggggtggcgaaagagttcaacactattgccgtggatgacgggattgccatggggcacgggggtatgctctattcactgccgtcgcgcgagctgatcgccgactccgttgagtacatggtgaacgctcactgcgctgacgcgatggtgtgtatctccaactgcgacaaaatcaccccagggatgctcatggcctcgctgcgcctgaatattccggtgatctttgtctccggcggcccgatggaagccgggaaaaccaagctttcagacaaaattatcaagctggatctggttgatgccatgattcagggagcggacccgaaagtctctgacgatcaaagtaaccaggttgaacgctccgcctgtccaacctgcggctcctgctccggcatgtttaccgctaactccatgaactgcctgaccgaagcgctgggcctgtcgcagccgggcaacggctcgctgctggcaactcacgctgaccgtaagcagttgttcctcaatgccggtaagcggattgttgaactgactaaacgctattacgagcaaaacgacgaaagtgcactgccgcgtaacatcgccagcaaagccgcgtttgaaaacgcgatgacgctggatatcgcgatgggcggttcgaccaacaccgttcttcacctgctggcggcggcgcaggaagcggaaatcgacttcaccatgagtgatatcgacaagctgtcccgcaaggtgccgcagctgtgtaaagtggcgccaagtacccagaaataccatatggaagatgttcaccgtgccggcggtgtgctgggtattttaggcgagctggatcgcgccgggctgctgaaccgcaacgtgaaaaacgtattaggcctgacgttgccgcaaacgctggaacagtacgacatcacggttacgcaggacgaagcggttaaaaaaatgttccgtgctggccctgccggtatccgtactacccaggcgttctcgcaggattgtcgctgggattcgctggatgacgaccgcgcagcgggttgcatccgctcgctggaatatgcctatagcaaagacggcggtctggcggtgctgtatggcaacttcgccgaaaacggctgcattgtgaaaaccgcaggcgtggatgacagcatccttaaatttaccggcccggctaaagtgtatgaaagccaggacgacgcggtagaggcgattctcggcggcaaagtagtggaaggcgatgtagtcgtgatccgctacgaagggccgaaaggcgggccgggaatgcaggaaatgctctatccgaccagtttcctgaagtcgatggggctgggcaaagcctgcgcgctcatcaccgatgggcgtttctccggcggtacttcgggtctttccatcggccacgtctcgccggaagcggccagcggcggcactattgcgttgattgaagatggcgacactattgcgattgatatcccgaaccgcagcattcagttgcagttgagtgaggctgaaatcgccgcacgccgcgaggcgcaggaagctcgtggcgacaaagcctggacgccgaaaaatcgtcagcgtcaggtttcgtttgccctgcgtgcctacgccagcctggcgaccagcgccgataaaggcgcggtgcgcgataaatcgaaattgggaggttgatgatggcggaatctcaacctctgtcagtcgcgccggaaggggcggagtatctgcgcgcggtgctacgcgcgccagtatacgaagcggcgcaggtgacaccgctgcaaaaaatggaaaagctctcgtcacgtctggacaacgttattctcgtcaaacgcgaagaccggcagccggtacatagctttaagctgcgcggcgcttacgcgatgatggccggattgaccgaagaacaaaaagcccacggcgtgattaccgcgtcggcggggaaccatgcacagggcgtggcgttttcctccgcgcggcttggcgtgaagtcgctgatcgtcatgccaaaagcaacggcggatattaaagtcgatgcggtacgcggttttggcggcgaagtgctgttgcacggcgctaattttgatgaagcgaaagcgaaagctattgaactggcgcagcagcagggttttacttgggtgccgccgtttgatcacccaatggtgatcgccgggcagggcacgctggcgctggaactgcttcagcaggattcgcatctcgatcgtgtctttgtgccggttggcggcggcggcctggcggcgggcgtagcggtactgatcaaacaattgatgccgcaaatcaaagtgattgccgtcgaagcggaggattccgcctgcctgaaagcggcgttggaagccggtcatccagtggatctcccgcgcgttgggttgtttgctgaaggcgtagcggtaaaacgcatcggcgacgaaaccttccgcctgtgccaggaatatctcgacgacattattacagtcgatagcgacgctatctgcgcggcgatgaaagatctgtttgaagatgtgcgtgcggtggcggagccgtccggcgcgctggcgctggcggggatgaagaaatatatcgcccagcacaatattcgcggcgaacgcctggcgcacgtcctttccggcgccaacgtcaacttccacggcttgcgctatgtgtctgaacgctgcgagctgggggaacagcgcgaagcgttactggcggtgaccattccggaagaaaaggggagctttctcaaattctgccagttgcttggcgggcgtatggtcaccgaatttaactaccgttttgccgacgcgaaaaatgcctgtatttttgtcggcgtacgcgtcagtcaggggctggaggagcgaaaagagattatcacccaactgtgcgacggcggttatagcgtagtggatctctccgacgatgaaatggcgaagctgcatgtgcgctatatggtcggcggacgcccctccaagccattacaggagcgtttgtatagtttcgaatttccggagtcgcccggcgcgttgctcaaattcctgcatacgcttggcacgcactggaatatttcgctattccattaccgtagccacggtaccgattatggccgcgtgctggcggcgttcgagttaggcgatcatgagccggatttcgaaacccggctgcatgagctgggctatgaatgccatgatgagagcaataacccggcgttccggttctttctggcgggttaattcagcgtttagtttttcgggcccacaaagtaaagtgggcctgatatccagatattatcttccctcagttattgggcttttctgccagcccggagcatccactcatttcattttgcgagacgttttccagaaggcgcccaatctgcttgtggtgaaactcggctcaccatatcgttagcaccgccatcacttgcacctgctaaaaacaatgtataaaattttatacacaaaggatgttatgttactcactcgagctctctccaatgaaaaagaaattcgatgagtgggatcttctctggaggatctcctggcttttcccataacggtacgtaaagcagtcggttatcagcttcacaaaattcagtatggaattgaacccgatgactggaaaccgttttcagaaattggggctggggtaaatgaaattcgtattcgtgacaacaatggtatctatcgcgttatgtatgtcgctaagtttgaagaagcactctacgttttgcatagtttccaaaaacagacgcaacaaaccagtcagcatgataaaaacatcgccagaacgcgttataaccgggtggtgcaacaacggagaaacagcttgtgattgccaaaactgatagtgatattcgccatgtgacgccatctggcggtaatgtttttgctgatttggggtttcataagcaggacgcagaaaagttttacgctgattccctgaatgaaatcgaaaacacgttagccattaaacaacagctaatggaagaaattaccctctggattacgcaaaaccagatgaagcaagccgaggttgctacagttttgcatatatcccgaccgcgcgtttcggatgtcgtcaacaagaaatgcagcaaattcaccattgatgctctggtgaatatgcttagccgtattgggaagcctgttcgggtaatggtagggccgtaaaactaattcggtaaaatcttccagaacgcatcaattagcggctcatgcagccgctttttttgcgcgcagacgccgagttcaaacggcgttttttcatcgctgcgttctaaaatcatcacccggttgcgcactggctccgggctgttttccagcaccacttccggcagcagcgccacgccgcagcccagcgccaccattgagaccatcgcttcgtgaccgccgacggtggcgtaaatctgcggattgctgattttatgccggcggaaccatagctcaatgcgacggcgtaccggcccctggtcggccatgataaacggcaccgtcgaccagtctggcttgtcgaccgaaacctgattacgcaccgggcagggcagcgccggggcgatcagcaccaccgccagattttccagcatcgaaaacgccactgcgccgggcagcgtttctggtttgccggcgattgccagatcggcctcgccggtgactactttttccatcgcatcggcggcgtcgccggtggtgagcttaatttccaccgagggatgctcggcgcgaaaacggtcgaggattggcggcaggtggctgtatgccgcggtcactgaacagaagatatggagttcgccggaaagggacggcccctgctgatcgagggtatggcgcagctgctggtactgcaaaagcgtctgttgggcaaacactcgcagctcttcacccgcttcggtcagcgtgaccgtacggttatcgcgcacaaacagcggctggccgagatcttcttccagccgctgaatctgccgggagagcgtggaggggctgacgtgcatcgcccgcgcgctgcggccaaagtggcggctttccgccagatgcaagaaggtttttagatcgcgtaaatccacagacagacctccggtttttgacgttgcataaaccgcaacataacgttgtgaatatatcaatttccgcaataaatttcctgttgtaatgtgggttcattcgcacagatagcaatctgtaaaccgaacaataagcgcgacacacaacatcacggagtacaccatcatggctaactactttaatacactgaatctgcgccagcagctggcgcagttgggtaaatgccgctttatgggccgcgacgaattcgccgacggcgcgagctaccttcagggtaaaaaagtggtcatcgtcggctgtggcgctcagggtctgaaccagggcctgaacatgcgtgactccggtctggatatttcctacgccctgcgtaaagaagccattgctgagaagcgtgcttcctggcgtaaagcgaccgagaacggcttcaaagtaggcacctacgaagagctgatcccgcaggctgacctggtagttaacctgacgccggacaaacagcactccgacgtggtgcgttccgtacagccgctgatgaaagacggcgcggcgctgggctactcccacggcttcaacatcgtggaagtgggcgagcagatccgtaaagacatcaccgtggtgatggtggcgccgaagtgtccgggcaccgaagtacgtgaagaatacaagcgtggcttcggtgtgccgacgctgatcgccgttcacccggaaaacgatccgcaaggcgaaggcatggcgattgctaaagcctgggcggcggcgaccggcggtcaccgtgcgggcgtactggagtcttctttcgtggcggaagtgaaatccgacctgatgggcgagcagaccatcctgtgcggtatgctgcaggccggttctctgctgtgtttcgacaagctggtggcagaaggcaccgacccggcttatgcggaaaaactgattcagttcggctgggaaaccatcaccgaagcgctgaagcagggcggcatcaccctgatgatggaccgtctgtctaacccggcgaaactgcgtgcttacgcgctgtccgaacagctgaaagagatcatggcgccgctgttccagaaacacatggatgacatcatctccggcgaattctcttccggcatgatggctgactgggctaacgacgataagaaactgctgacctggcgtgaagagaccggcaaaaccgcgttcgaaaccgcgccgcagtatgaaggcaaaatcggcgagcaggagtactttgataaaggcgtgctgatgatcgcgatggtgaaagcgggcgttgagttggcgttcgaaactatggtggattccggcatcatcgaagaatccgcttactacgaatcactgcacgagctgccgctgatcgccaacaccatcgcccgtaagcgtctgtacgaaatgaacgtggttatctctgataccgcagaatacggtaactacctgttctcttacgcttgcgtaccgctgctgaaaccgtttatggcggaattgcaaccgggcgatctgggtagtgctatcccggaaggcgcggtagacaacgcacagcttcgcgacgtgaacgacgcgattcgtagtcatgcgattgagcaggtaggtaagaaactgcgcggctatatgacggatatgaagcgtattgcggtagcgggttgatataccttgtcggggggcgctagcgcttacctgacctacaaaatcaagcagacgatgtaggccgggtaaggcgtagccgccacccggctttttatttacgatacaataccttaatgatgtggtaaccgaactgggtatgcagcgggccggttggctccagtaccgggcaggaaaagactactttatcgaatgccggaaccatctggccctgacgaaattcgcctaaatgaccgccttttttaccggatgggcagatagaatgcttcttcgccagcttctcaaaatcgccgccgtttttaatttgctccagaagatctaaagccagtttctcttcttttacaagaatatgcagtgctgctgccatttttgccattattgtgttctcacgtcgcaaagattggccgtcactttatcactccttaggccgtcagacatatactcttcgccattacaggacagatgtcccgcctgatttaatgaaccgggagataagcagcatttttagcgggcgtatttcggatgtgcgggacggcggtcctgtcctttctgacaaggggcgagataccatgaacataatgaaaaacgcagaatttccagacgactggcttttagggctacgccaggtcgtacgcgacccagtgctctatgaattactcaaatactgcccgttggaaatcatgcagtacagggcgtttatgcgatgtcgcttgagtatgttctgctgacggcgatcgcgctaatgggttctttcagttggatcaagagcgcacagcgtaatggctatatgccgcttgccgccagagcctgctgattgaccttttccaggctgcctgaaaaagcagcctggtcttctctgggcctcgctttctgctacaatccctcccccgttcgaagattgagcactattcccatgcgtttaaatcccggccaacaacacgctgtcgaattcgtcaccggaccctgcctggtgctggcaggagcgggttctggtaaaactcgcgtaattaccaataaaatcgcccacctgatccgcggatgcggctatcaggcccggcatattgcggcggtgacgtttaccaacaaggcagcgcgtgagatgaaagaacgggttgggcagacgctcggccgtaaggaagcgcgcggtttgatgatctccacctttcatacgctagggctggatattattaagcgcgagtacgctgcgctggggatgaaatcgaacttttcattgtttgacgataccgaccaggtcgccttgctcaaagagctgaccgaaggcctgatcgaagacgacaaggttctgttgcaacagctgatctccacgatctccaactggaaaaacgatctcaaaacgcctgcgcaggcggcggccggggcgaaaggcgaacgcgatcgtatttttgcccactgctacgggctttacgacgcccatatgaaggcatgtaacgttctcgattttgatgatttgattttgctgccgacgctgctgctgcaacgcaatgacgaggtgcgcgagcgctggcagaataaaattcgttatctgctggtggatgaatatcaggatactaacaccagccagtatgagttggttaagctgctggtcgggcaacgcgcgcgctttacggtcgtaggcgatgacgatcagtctatctactcctggcgcggggcgcgtccgcaaaacctggtgttactgagccaggattttccggcgctgcaggtgattaagctggagcaaaactatcgttcttcgggccgcatcctgaaagcggcgaatattctcatcgccaacaatccgcacgtctttgaaaagcgcctcttttccgagctcggttacggcgcggaactcaaagtgttaagcgcaaacaatgaagagcatgaagctgagcgcgttaccggcgaactgattgcccatcactttgtgaacaagacccagtacaaggattacgccattctgtatcgcgggaatcatcagtcgcgggtatttgaaaaattcctcatgcagaaccgcattccgtacaaaatttccggcggcacctcatttttctcccgtccggagattaaagacctgctggcctacctgcgggtgttgaccaacccggatgatgacagcgctttcctgcgcatcgtgaatacgccaaaacgcgaaatcggtccggccacgctgcaaaagctgggtgaatgggcaatgacgcgtaataaaagcctgtttaccgccagctttgatatgggacttagccaaaagctgaccggacgtggttacgattcattgacgcgttttacccactggctgggggaaatccagcgtctggccgaacgcgagcctgtcgccgccgtgcgcgatctcatccacggtattgactatgaatcctggttgtacgaaacctcgccgagccccaaagcggcggaaatgcgtatgaaaaacgttaaccagctctttagctggatgactgagatgctggaaggcaacgaactcgatgagccgatgacgctgacccaggtggttacacgctttacactgcgcgatatgatggagcgtggcgagagcgaagaagagctggatcaggtacagttgatgacgcttcatgcatcgaaaggactggaattcccgtatgtctatatggtgggaatggaagaaggatttttgccgcatcaaagcagcattgacgaagataatattgaggaagagcgtcggctggcctatgttgggatcactcgcgcgcagaaagagctcacctttacattatgtaaagagcgccgtcagtatggggaactggtgcgcccggaacccagccgcttcctgttagaactcccgcaggatgatttaatctgggagcaggagcgcaaagtggtaagcgctgaggagcgaatgcaaaaagggcaaagtcacctggctaatctgaaagccatgatggcggcaaagcgagcgaaatcgtaggccggataagcgaagcgtcatccggcaatcaaactacggttagcgaacgtccagcggccagtgtacatagctttgccactggctttcctgatcaatcaactctttacccagcgggtgatgcgccagccagtcgccaggcaaggttaacgtcagattttcatttagcgcctgtagcgtaatttctggtaccagatcgtcacgacggcgaccagcaaaaagaatcgccaggcgcagcaaacggcatagctgttccgcaacacggggcggtaccgcgttttgctgatgaagcgaagagagatcgaccggattggtctgattcagtaagagggtggcgagcaattttttctgcgcgggcgtatagccaggcagatccaaatggcgtactaaataggcggcatgatagggcgcctgtttaaaatcaacgctcagaccgatctcatgcaactggcaagcgctaagcaacagttcacgactgataggctcaatatgccaggcattttctacctgtttgaggaagttatctgccagcttcgctacgcgatttgcctgatcggtatcgacgataaaccgacgctgaatgtttcgcagcgtgcggctgcggatatcctgatctaccgccagatgcaacatcccatacaccagcccttcgcgtaacgcgccgcctgccagcgtcatgctctggatgttcagctcggtaaatattgcgatcagaatagccagcccgcttgggaaaaccagcgcgcgctccagcgtcaggccttcgatttccagctcttccagacgcccgcactgtatcgcgcgttgttttagctgctgcagtttggcgagcgtaatgcgctcgtccatcccctgcgccatcatgatttcctgcaatgcctgtacggtgccggaggcacccacgcagaccttccagccatgaaaacgcagttcatcggcgaccggacgcagtacatcgcgcgcggctttctccgcgtcatcaaaattttcttgcgccagattacgatcgctaaaatagcgttcaagccacgttacgcagcccatcgacaggctaaacagcgacgtggtttgcgcgccagtgccggtaaccagttcagtgctggcgccgccgatatccaccaccagtcgctgatctgcgccgccggtggtatgagcgactccctgataaatcagccgcgcctcttcttcgccgctgataacctgcaccggacaaccaaggatagtctgcgctttcgcgataaattcccccgcattaacggcgagacgcaatgttgcggtggcaaccacgcggatttgcggctgcgggatatcctgcaaacgttcagcaaacagacgcaggcattgccagccgcgttccatcgcttcggccgaaaggtggttgtcgttgttcagacccgcggccagacgcaccttgcgttttattcgggtcagcgtctggatgcttcccgccgcctcgcgcacgaccagcatatgaaaactattggaaccgagatcaatggcggcatacaacgaggtggaattcatacacttcatccttcaacctgtatccgtgttggctgcgtactcttcctaagctcatcgggatttgttttcttgccgccttgatacaggctaaatgattttgtgtatggcataacttttcttaacctgaacgacgacgattacgcggagcgccagcgcggcgcggaccattgccaggacgcgaacgcgtcagacgcaacggcttgggcagatcgttcatgagcgcttccggattgtatttgctgaccggaatcgagtggccgatatagctctcaatggcgggcagattcagcgcatactcttcgcaagccaggctgatggaatgtccgctggcgccagcgcgaccggtacgaccgatacggtgaacatagtcttcacaatcgtctggcagatcgtagttaaagacgtgcgttacggcggggatatgcaacccgcgcgccgcgacatcggtcgccacaagaatatccagatcgccgcgggtgaactcatccagaatccgcaggcgctttttctgcgcgacgtcgccggtcagcagaccaacacgatggccatctgccgccagatgtccccagatatcttcgcaacgatgcttggtgttggcgaaaataatggcgcgatccggccactcttcttcgatcagcgtttgcagtaaacgcattttctcttcattagaggggtagaaaagctcttctttaatgcggtggccggtcttttgctccggttccacttcaacatattcggcgttgttcatctgttcaaacgccagctcgcgaacccgataagacagggtggcggagaacaacatgttcagacgctgcgcagccggcggcatacgacggaacagccagcggatatctttaataaagcccaaatcgtacatgcgatcggcttcatcgagtacgacgacctgaatggcgccgaggttaatgtgattttgtttggcgtagtcgatcagtcggcccgtcgtaccaataagaatatcaacgccgctttccagcactttaagctgcttgtcgtaaccatcgccgccgtaagccaggcctaattttaagcctgtcgcttgcgccaacggctccgcgtctgcgtgaatttgtacggctaattcacgcgtcggcgccatgatcagcgcgcgcggctggttcaccttgcgatcgtcgatcgcgggatgagaaagtaaataatgaaacgttgacgtcagaaacgccatcgttttcccggtaccggtttgcgcctgccctgcaacgtcacgacccgccagcgttagcggaagggccagtgcctgaatgggcgtacaattataaaacccttttttttcaagggcttcaaccacctgtgggtgcagggcgaagtcggaaaacttctgttctgttaaatgtgttttgctcatagtgtggtagaatatcagcttactattgctttacgaaagcgtatccggtgaaataaagtcaacctttgttggcgaagttaacatcagcacctcgttggttaatgctacaccaacacgccaggcttattcctgtggagttatatatgagcgataaaattattcacctgactgacgacagttttgacacggatgtactcaaagcggacggggctatcctcgttgatttctgggcagagtggtgcgggccgtgtaaaatgatcgctccgattctggatgaaatcgctgacgaatatcagggcaaattgaccgttgccaaactgaacattgaccagaacccaggtactgcgcctaaatatggcatccgcggtattccgactctgctgctgtttaaaaacggcgaagtggcggcaaccaaagtaggcgcactgtctaaaggtcagttgaaagagtttctcgacgccaatctggcgtaataccttttatacgtcgaatgacaaaggcgctgtatggtcaggcgtctgtcattcgacgaatgattaaggtatcaggcagtttcgtggcgtctgttgtccttacgttattcttaaattgtcaggatctctggacgcccggtctgagtcgtgctaagttagtattgacttcgaattaaacataccttattaagtttgaatctggttttatccgtcacttcccgttttttctcgcacgagaagtggaaagattcctggctcttcgctcattccgtcttgtcgtttcagttctgcgtactttcctgtgaccagacagcgaacagacatgagttgatagccgtaaacaggcatggatgaccctgccataccattcacaacattaagttcgagatttaccccaagtttaagaactcacaccattatgaatcttaccgaattaaagaatacgccggtttctgagctgatcactctcggcgaaagtatggggctggaaaacctggcccgtatgcgcaagcaggacattatttttgccatcctgaagcagcacgcaaagagtggcgaagatatctttggcgacggtgtgctggagatattgcaggatggatttggtttcctccgttctgcagacagctcctacctcgccggtcctgatgatatctacgtttcccccagccaaatccgccgtttcaacctccgcactggtgataccatttctggtaagattcgcccgccgaaagaaggtgaacgctattttgcgctgttgaaagttaacgaagttaactacgacaaaccggaaaacgcccgtaacaaaatcctctttgagaacttaaccccgctgcacgcaaactctcgtctgcgtatggagcgtggtaacggttctaccgaagacttaacggcgcgcgttctggatctggcttcgccgatcggtcgcggccagcgcggtctgattgtcgcgccgccgaaagcgggtaaaaccatgctgctgcagaacatcgcgcagagcatcgcgtataaccacccggactgcgtgctgatggtgctgctgattgacgaacgtccggaagaagtgaccgagatgcagcgtctggtgaaaggcgaagtggttgcttctacctttgacgaaccggcatcccgccacgttcaggttgccgaaatggttatcgagaaggcgaagcgtctggttgaacacaagaaagacgttatcatcctgctcgactccatcacccgtctggcgcgcgcctacaacaccgtggtgccggcttccggtaaagtattgaccggtggtgtggacgctaacgccctgcatcgtccgaagcgtttcttcggcgcggcgcgtaacgtggaagagggcggtagcctgactatcatcgcgacggcgctaatcgataccggttccaagatggacgaagttatctacgaagagtttaaaggcaccggtaacatggagctgcatctctcgcgtaagatcgctgaaaaacgtgtcttcccggctatcgactacaaccgttccggtacccgtaaagaagagctgctcaccactcaggaagagctgcagaaaatgtggatcctgcgtaaaatcatccatccgatgggtgaaattgacgcgatggaattcctcattaacaaactggcgatgaccaaaactaatgacgactttttcgagatgatgaagcgctcataacctggtctttacctgaaaacgccacgtttttacgtggcgtttttgttttgcgattcatcctggcgtcatgtcatataaactggtcatcgggatatgcgctacagagtaacaccatgcacaatacacattgtttgcggtaaaaagtgtaatgttctaacaggtctcttctaggagctggcgtaacgcattatactttaaggaaatgatatatgctgagagcacatacactgtgaagttactcaccgctttatctgagctaatcagtatttttttattcacgaccatttttatttttcttgcgcgaaaagtagccataaaaattggtttagtggataaaccaaactttcgtaaacgacatcagggcgttatcccattagtcggcgggatttctgtgtttgcaggaatctgctttatgtttggcctctcggattactacataccgcacttatcgctatatcttatttgcgctggtgtattggtttttgttggtgcgatggatgaccgttttgatatcagtgtaaaaattcgtgctgtggttcaggctgttattgcggttgtaatgatggttatcgcaaaacttcacttaggtagccttggttacatctttgggccttgggagttagtgcttggcccctttggctatttccttactctgtttgcggtatgggcggcgatcaacgctttcaatatggtggacggtattgacggcctgctgggtgggttatccagcgtctcatttgcggcgatggggctgattttatggtttgatggtcagactagtctggcaatgtggtgctttgccatgatcgccgcgattctgccttacattatgcttaatctcggtattttggggcggcgttacaaagtctttatgggcgatgccggtagtacactgattggctttaccgtcatctggctcttactggaaacgacgcaggggaaaactcactctatcagcccggttaccgcgctatggattatcgctattccattgatggatatggtggcgattatgtatcgccgtctgcgtaaagggatgagccccttttcccctgatcgccaacatattcatcatttggttatgcgagcagggtttacttcccgccaggcatttgttcttattacgctcgcagcggcgattctggcgggagtaggcgtaacggcagaatactctcattttgttcctgaatgggttatgttggtgctctttttgctagcattcttcctctatggctactgcattaagcgggcctggaaggtggcgagatttattaagcgtgtgaagcgtcgcctgcgcaggcaacgtgagaaccggccaaacttaaccaagtaaatgaggatacgatgacacaaccattaccgggggcacgcgcggtgagcgctgaaaatgaactggatattcgcgggttgtttcgtactttatgggctggcaaattctggattatcggcattggcctgctatttgcccttatcgcgttagcctataccttttttgctcgtcaggagtggagtgcgacggcgatcaccgatcgcccaaccgtaaatatgttgggcggttattactcccagcagcagtttctgcgcaacctggatattaagaccgatcctgcttcttctgataagccctcggtgatggatgaagcgtataaagagttcatcatgcaacttgcctcctgggatacgcgtcgcgatttctggttacagacggactattacaagcagcgaatggtcgggaatagcaaagctgatgcggcgatgcttgatgaactgatcaataacatacagtttacgcccggcgattttacacgcgccatcaacgacaatgtgaagctgattgctgaaactgcgccggacgccaataatctgctgcgtcagtatgtcgcattcgccagccagcgggcggcgagccatctgaatgatgaattaaaaggtgcctgggctgcgcgtaccgtgcagatgaaagcccaggtcaaacggcaggaggaggttgcgaaagcgatctattcgcgtcgtgtaaacagtattgagcaggcgctcaaaattgcggaacaacataatatttctcgtagcgcgacggatgtcccggcggatgaattaccggactcagagctttttttactcggtcgccctatgttgcaggcgcgtcttgaaaatctgcaagcggttggccctgcgttcgatttggactactttcaaaatcgggcaatgttgaatacgcttaatgtggggccgaccctggaccctcgttttcagacctatcgttatttgcgtacgccggaagaaccggtaaaacgtgatagcccacgccgagccttcctgatgatcatgtggggtatcgttggggcgctaatcggtgcgggcgttgccttaacccgtcgccgcacgatttagcaacacctctgcagtagggggctgggcccctactgtctattcgaagagaatcgatgtgaaagtactgactgtatttggtacacgaccggaggccattaagatggcgcctctggtccatgcgctggaaaaagatcctcatttcgaggccaaagtatgcgttactgcgcagcatcgggagatgcttgatcaggtattaactcttttttctattgtgcctgattacgatctcaacattatgcagccgggacaggggttgacggaaattacctgccgaattctggagggattaaagccgatcctggcagattttaaacctgatgtggtgctggttcatggcgataccaccactacgattgctaccagcctggcggctttctatcaacgaattccggtagggcacgtagaagccgggttgcgaaccggcgatctctattccccctggccggaagaggcaaaccgcacgctgaccggacatctggcgatgtaccactttgcgccgacggaaaactcgcggcagaatctgttgcgggagaacattccggatgagcgcatttttgtcactggcaataccgttatcgacgcgctgatctgggtacgcgatcgcgttctgacgagcgatacattacaggctgaactggccgagcagtatcctttcctcaacgcgaataagaagatgattttagtgaccggtcatcggcgtgaaagctttggtcagggctttgagcatatctgccaggcgctggcggaaatcgccgccgcgaaccagaatgtgcaaattgtctatccggtgcatctcaatcccaacgtcagcgaacctgtcaaccgtatcctcggccatgttgaaaacgtggtactgattgagccgcaggactacttaccttttgtctggctgatgaatcacgcctggctcattctgaccgattccggcggtattcaggaagaagcgccgtcattaggtaagccggtattggtcatgcgtgaaaccacagagcgtccggaagccattaccgctggtacggtaagactgatcggcacggactcccggcgcattgtggcggaagttatgcgtctgctgcacgacgaaaatgaatatcaaaccatgagccgcgcccataatccttatggtgacgggcaatcatgcgcgcgcattttacaggcgttaaaaagttatcgggtatcgttatgagttttacgaccatttctgttattgggctggggtatatcggattaccgactgcggccgcttttgcttcccgccagaagcaggttatcggcgtggatatcaaccaacatgcggtagacattataaatcgcggtgaaattcacatcgtggagccggcgttgggcaatgtggtgaagatggcggtggagggcggctttctgcgtgcgacgacgacacctgtcgaggccgatgcgtacctgattgccgtgccgacaccattcaaaggcgatcacgaccctgacatggcctatgtcgaagccgcggcgaaatccattgcgccagtattaaaaaaaggggcactggtgattctggaatcaacatcgccggtcggcgcaacggagcaaatggctggctggctggccgggatgcgcacggatctgacctttccccagcaggcgggcgagcaggccgatgtgaatatcgcctattgtccggagcgtgtgctgccgggtcaggtgatggtggaactcattaaaaatgaccgcgtgattggcggtatgacgccagtatgttcggctcgcgccagcgcgctgtacaaaattttccttgagggcgaatgcgttgtcaccaactcgcgcaccgcggagatgtgcaaactgacggaaaatagcttccgtgatgtgaatatcgcctttgcgaatgaattgtcgctgatttgcgccgaacaggggattaacgtttgggaattgatccgcctggcgaaccgccatccgcgcgtcaatattttgcagccgggcccaggcgttggcgggcactgcattgcggtcgatccgtggtttattgtggcgcaaaatccgcagcaggcgagactgattcgcaccgcgcgtgaagtgaacgacggcaaaccgcactgggtggtcgatcaggtaaaagccgcggtcacagattgcctggcggccaccgataaacgcgccagcgaagtgaaaatcgcctgttttgggctggcctttaagccgaatatcgacgatctgcgcgaaagcccggcgatggggatcgcgcaaagtatcgcccgctggcacagcggcgaaaccctggtcgtcgaaccgaatatccgtcagttgccgaaaaaattggacggactttgtacgctggcgaaactggacgcggcgctggccgccgccgatgtgctggtgatgctggtcgatcacgacgaatttaaagcgattcccggcgatgcggttcatcaacgttatgtggttgataccaaaggagtctggcgctgatgaaacgcattctggtgaccggcggcgcaggctttatcggatctgcggtggtgcggcatatcatccatgaaacggcagacgcggtggtggtggtggataaactcacctatgcgggcaacctgatgtctctggcgtcggtggcgcaaagcgaccgtttcgcctttgagaaggtggatatctgcgatcgggcatcactggagcgagttttccagcagtatcagcccgatagcgtgatgcacctggcggcggaaagccatgtagaccgttccatcgacggcccggcggcgtttattgaaacgaatatcgttggtacttacaccttgctggaagccgctcgcgcttactggtccgcgcttgacgcggacgctaaagcggcgttccgcttccaccatatctccaccgatgaagtgtatggcgatctgcatactgcagacgatttcttcaccgaaaccacgccatatgcgccaagcagcccttattccgcctccaaagccagcagcgaccatctggtacgcgcctggttacgtacctacggtctgcctacgcttgtcaccaactgctctaataactacgggccctaccatttcccggaaaaactgatcccgctgatgattctgaacgcgctggcgggtaaaccattgccggtctatggcaacggtcagcaaattcgcgactggctgtatgtggaggatcatgcccgtgcgttgtatcacgtggtgacgaacggcgcggtgggtgaaacgtataatatcggcggtcataacgaacgtaaaaatctggatgtggtcaggacgatctgcgctctactggaggaactggccccgcaaaaaccgcagggtgtggtgaattatcacgatctgattaccttcgtcgacgatcgccccggccatgacttacgttatgccatcgacgcgtcgaaaatcgcccgcgagctgggctggacgccgcaggaaaccttcgaaagcgggatgcgaaaaaccgttcagtggtatctcgccaatgaggcctggtggaaacccgtgcaggatggcagttatcagggcgaacgcttaggactgaaacgctaaacggcaggttcttactcctggaggagaaacgaatgaaaggcatcattctggcgggaggttccggtacccggttgcatcccattacgcgcggcgtatcaaagcgccagggcttcaaaattgcctgtctggaggagattgcctggcgcaacggctggctggatgatgatggtttgaaacgcgccgccagtcagcttgaaaaaaccggctatggccaatatttactggagttgctccgtgcccgtccgcgccagtattgaaccgttactctgggaaaatacgttctttggcgtgaatagcggcattgtgcgtatcgatgcctcagcgcccgaattaacgccagaagcactgcaggcgtggcaacgcgtgcaggtaaaagtgccggctgaaaacatcgcctggctgtcggcgttgcaatcgctgggattctctttggttgaaggcgaggtggattttgcgttgccggtaaaagggcatcgcgaccagcatggcgcggaaattgcacaccttacggacattcctgctttgcgtcagttggccggagaggcgtttacgcagagtcgttttcgcgcgccgtggtatgcgcccgacgccagcgcccgtttttacgcccagtggattgagaatgcggtacgcggcacgtttgatcaccaatgcctggtgcttcgcacggagacaggcgctatccgcggttacgtctcgctgcgggaattgaatgataccgacgcgcgcattggcctgttggccggacgcggcgcgggagcggaacttatgcaggcggcgatctgttgggcgcagagtcgcggcaaagcaacattgcgggtggcgacccagttgggcaacaccgccgcgcttaaacgttacatacaaagcggtgccaacatcgaaagcactgcgtactggttatacaggtgacaacatgattccttttaatgcgccgccggtggtgggaaccgaactcgaatacatgcagtctgcaatgagcagcggcaaactgtgcggcgacggcggctttacgcgtcgttgccagcagtggctggagcaacatttcggcagcgcgaaggtgttgctaacgccttcctgtaccgcatcgctggagatggcggctctgttgttggatattcagcccggcgatgaagtgatcatgccgagctttacgtttgtctccaccgctaacgcttttgtcctgcgcggcgcgaaaattgtgtttgtcgatattcgtccggatacgatgaatattgacgaaacgctgattgaggcggcgattactgataaaacccgcgctatcgtgccggtacactacgctggcgtcgcttgtgaaatggacgtcatcatggcgctggcggataagtataatctgttcgttgtcgaggatgccgcccagggtgtgatgtccacgtacaaagggcgcgcattagggacgatcggtcacatcggctgttttagcttccatgaaaccaaaaattacaccgctggcggcgaaggcggcgcgacgctgatcaacgatcgtacgctaattgaacgcgcggagatcatccgcgaaaaaggcaccaaccgtagccagttcttccgtggtcaggtggataaatacacctggcgggatatcggctccagttatttgatgtccgatctgcaggctgcctatctgtgggcgcaactggaggccgccgatcgtatcaatcaacagcgtctgtcgctgtggcagacttactacgatgcgttaacgccgctggcgcgcgccgggcgtttcgagctgccttctattccggaaaactgcgggcataatgcccatatgttttacatcaaactgcgggatatcgccgatcgcagcgcgctgattaatttcctgaaagaggcggaaatcatggcggtattccattacattccgctgcatgattgtccggcgggcgataaattcggcgagtttatcggggacgatgtctacaccacaaaagagagcgaacgtttgttgcgtctgccgctgttttataaccttgcgcccgtcgatcaacgaacggtgattactaccttgctaaattatttctcctgatatgtcgcttgctaaagcctccctgtggacggcggtcagtacgctggtaaaaattggcgccggactgctggtggtgaaactactggccgtctcttttggtccggcgggcgtcggacaagcgggtaacttccgccagatgattaccgtgctgggcgtattggctggcgccgggatatttaacggcgttaccaaacttgtcgcacaacatcatgataacccggcgcagttacgtaccgtggtgggaacctcctccgcgatggtattggggttctctacgctgctggcgctggtcttcttgctggcggcggcgccgattagccagggattgttcggtcatacggactatcaagggctggtgcgtctggttgcgctggtacaaatggggatcgcctgggcgaacctgctgctggcgctaatgaagggctttcgtgacgcgtcgggtaatgccttatcgttaattgtcggcagctttttgggcgtcgccgcctggtatctctgctaccgtgtcggcggctatgaaggcgctctgcttggcctggcgctggtgccggcgctggtggtagtgccagccggtataatactgattaagcgcggcaccgtcccgctacgctatctcaagccctcctgggacaacggtctggcagggcagctcagtaaatttaccctgatggcgctgattacctccgttacgatgccggttgcctatgtgatgatgcgaaaccaactggccgcgcactatagctggagcgatgtcgggatctggcagggcgtaagcagtatttctgacgcctatctgcaatttatcaccgcctccttcagcgtttacctgttacccacgctctcacgcctgacggaaaaacaggacattacgcgtgaagtggtaaaagcgctgaaatttgttttaccggcggttgcggcggcgagttttaccgtctggctactgcgcgattttgctatctggctgcttttttccgctaaattcaccgcgatgcgcgatctgttcgcctggcagttagtgggcgacgtgctgaaagtcggcgcctatgttttcggttatctggtgattgccaaagcgtcgttgcgattttacattctggctgaaattagccagttcattctgttaacggcgttcgctcactggctgattcccgctcacggcgcgctgggtgcggcacaggcttatatggccacctatattgtctatttttcactttgttgcggcgtatttttactctggcgtaggcgagcatgactgtactgattcacgtcctgggatcggatatccctcaccataaccacaccgtgctgcggtttttcaatgatacgctggccgccacaagcgagcacgcgcgcgaatttatggttgccggcgaagataacggcttcacggaaagctgcccggcgctctcgcttcgtttttatggcagtaagaaagcgctggcgcaggcggtcatcgccaaagcgaaagcaaatcgtcgacagagattcttctttcacggtcagttcaacaccagcctgtggctggcgctgttaagcggcggtattaagccagcccagttttactggcatatctggggcgcggatctctacgaagtgtcccacgggctgaaattccgccttttctacccgcttcgtcgtatcgcgcaggggcgagtagggggcgtattcgcgacgcgcggcgatctcagctattttgcgcgtcagcatccggacgtacgcggcgagttgctctatttcccgacgcgcatggacccttccctgaatgctatggcaaaagagcgccaacgtgcggggaaattgaccattttggtagggaactccggcgatcgcagtaaccaacacattgcggcgttacgggcggtgtatcagcagtttggcgacacggtaaacgtggtggtgccgatgggctatccggccaataaccaggactatattgatgaggttcgtcaggccggtctggcgctatttagcgccgaaaatttacaaattcttagcgaaaaaatggaatttgatgcctatcttgcgctgttgcgccagtgcgacctcggttattttatttttgcccgccaacaggggatcgggacgttgtgtctgctaattcaggccgatatcccgtgcgtactgaatcgcgacaatcctttctggcaggatatggcggaacagcatctgcccgtcctgtttaccacggacgatcttaatgagcaggtcgtgcgcgaggcgcagcgtcagctcgcatcggtagataaaagcggcatcaccttctttagccccaactacctgcaaccgtggcataatgcgttgagaatcgccgcaggagaagccgaatgagtttaatgcaattcagcgggctgctggtggtctggctgctctctacgctgtttatcgccacgctgacctggtttgaattccgccgcgtgcgttttaacttcaacgttttcttttcgttgctgtttttgttgaccttcttttttggttttccgctaaccagcgtgctggtatttcgtttcgacgttggcgtcgcgccgccggaaatcttattgcaggctctattatccgccgcctgtttctacggcgtgtattacgtgacctataaaacgcgtttacgcaaacgcgttgtggatgtaccacgcaagccgctatttaccatgaaccgggtggaaacccaccttacctgggtgatcctgatgggcatcgcgctggtgagcgtggcgattttctttatgcataacggctttttgctgttccggctgcactcctacagccagatcttttccagcgaagtctccggcgtggcgttaaaacggttcttctatttcttcattccggcgatgctggtggtctatttcctgcgccaggacagcaaagcgtggctgttctttctggtgagcaccgtcgcgtttggtctgttgacctacatgattgtcggcggcacgcgcgctaacatcattattgcgtttgctatcttcctgtttatcggcattattcggggctggatcagcctgtggatgctggcggcggcgggcgtgctggggattgtcggtatgttctggctggcgctcaaacgctacggattaaatgtgagcggcgatgaggcgttctatacgtttctttatctaacgcgcgataccttttcgccgtgggagaatctggcgctgctgttgcaaaattaccacaatatcgagtttcaggggctggcccctatcgtgcgtgatttctacgtctttattcccacctggttatggccgggacgacccagtattgtgctgaactctgcgaattacttcacttgggaagtcctgaacaaccattctggcctggcgatatcgccaacgcttatcggatcgctggtggtcatgggcggggcgctgtttattccgctcggcgcgatcgtcgtcgggctgattatcaaatggttcgactggctgtatgaactgggtaaccgggagcccaatcgctataaggcggcgattctgcacagtttctgctttggcgccatctttaatatgattgtgctggcgcgagaagggctggattcgtttgtttcgcgcgtggttttcttcctggtggtttttggcgccagcctgctggtcgctaagcttctgttctggttatttgatagcgccgggctgattcataaacgtacaacttcgctccctcaggcacaggtggaaggaaaactatgaccaataatgccgctgcgcccctttactcgctgcgtggattacctctgattggctggcgcgacatgtcacacgcgctgaattatctgtttgccgatggtcaactgaagcaaggcacgttggtggcgatcaacgccgaaaagctgctgacggcggaagataatccggaagtccgcgcgttgatagcggcggcggaatttaaatatgccgatggcatcagcgtggtgcgttcaatacgtaaaaaatttccgcaggcgcaggtttctcgtgtggctggcgccgacctttgggaagcgttaatggcgcgcgcgggaaaagaaggcacaccggtatttcttgtcggcggcaagcctgaggtgctggcgcagacggaagcaaaactgcggacgcagtggaacgtcaatattgtgggtagccaggacggttactttacgccggagcagcgtcaggcgctatttgcgcgtatccatgccagcggcgcgaaaattgtcaccgtcgcgatgggatcgccaaaacaggaattgctaatgcgcgattgtcgggaagtgcatccccatgcgttatatatgggggtgggcgggacctatgatgtgtttactggtcacgtcaaacgcgctccaaaaatatggcagaacctgggactggagtggttgtatcgtctgctttctcaaccgaggcgtattacccgccagatgcgcctgctgcgctatcttcgctggcactatactggcgatctctaattctcccttctgatgacttgagcagcggattgtgcttatggtgctgctcatttacaacataatcgatgatttcttacacaataagtgcatttttttaatgctccatttgccatttgtccaaatttaagaaaatattcgcaacaatcgatgtacccataacaataaccggtactaccggaaccgttgcaaacacgacatgaggatttatggcagagaaaaaaccggagctacagcgtgggctggaagctcgtcatattgaattgattgccctcgggggcaccatcggcgtcggactctttatgggcgccgccagtacgctgaaatgggcgggcccgtcagtgctgctggcgtatatcatcgccggattgttcgtctttttcatcatgcgttcgatgggggagatgctctttctggaacctgttaccggctcctttgccgtgtacgcccaccggtatatgagtcctttttttggctatcttaccgcctggtcatactggtttatgtggatggcggtcgggatctcggaaattaccgccattggggtctacgtccagttctggtttccggagatggcgcagtggataccggcgctgattgccgtcggactggtcgcgttggcgaatctggctgcggtgcgcctgtatggtgaaatcgagttctggtttgcgatgatcaaagtcaccacgattattgtgatgatcatcatcggtctgggggtgattttcttcggctttggtaacggcggccaggcgattggctttggtaatctgaccgagcatggcggcttttttgccggcggctggaaaggctttctcaccgcattgtgtatcgtggtggcctcttatcagggggttgagttgatcggtattaccgccggtgaagcgaagaatccgcaggtgacgttgcgtagcgcggtgggtaaagtgctgtggcgtatcctgattttttatgttggcgcgattttcgtgatcgtcaccattttcccgtggaatgagattggcagcaacggcagcccctttgtgctcaccttcgcgaaaatcggcatcaccgccgcggcaggcattatcaactttgtcgtgctgacggcggcgctctccggctgtaacagcggaatgtatagctgtgggcgtatgctttacgcgctggcgaaaaaccgtcaactgccggcggcagtcgcgaaagtctctcgccacggcgtgccggtcgcgggcgtggcgctctctattttgattttgctggtaggttcttgcctgaactacatcatccccaatccgcagcgcgtctttgtttacgtttatagcgccagcgtactgccggggatggtgccgtggtttgtcattctgattagccaactgcgctttcgtcgggcgcataaagaagcgattgcggatcatccttttcgttccattatgtttccgtgggcgaactatttgacgatggcgtttctggtttgcgttttaatcggcatgtactttaatgaagatacgcgcatgtcgctgtttgtcggcgtcatcttcctgctggccgtcacgctggtctacaaagttttcggtctgaatcgtcacggaaccgcccacaaggtgggggaataagcgccaaaatgcgcaaagcataaccaaacgcgcattttatttaaaaaggcactggacagcggggtgtgaagtccgtattatccacccccgcaacggcgctaagcgcccgtagctcagctggatagagcgctgccctccggaggcagaggtctcaggttcgaatcctgtcgggcgtaccatttatttaggtgcttgagctgcggtggtttaataccgcgtaaaaagtttcagtggtggctatagctcagttggtagagccctggattgtgattccagttgtcgtgggttcgaatcccattagccaccccattaatatagagttgtgaaacgcgaaggtggcggaattggtagacgcgctagcttcaggtgttagtgtccttacggacgtgggggttcaagtcccccccctcgcaccacgactcaatgaattgaactaaaaattcaaaaaagcagtatatcggcgagtagcgcagcttggtagcgcaactggtttgggaccagtgggtcggaggttcgaatcctctctcgccgaccaattttgaaccccgcttcggcggggttttttgttttctgttccttttcaaccccttatcccgcacgtgttgccattatgatttgttggcgatatcccaggcttcatttgtcgctattcggtgacgagtaatctattgatttataatcactttgtaaaaagcatcctgttctgtctccaccgggcgacacgctaaaacctcgccagcggcggggggatgacaatcgcgtgaattctctacgtttttttaatgcctgcgcctgttttttagcggtgcaaagatggcacgttatgtgcaataatgtacgggtagatgctcattccatctcttatgttcgccttctggcctcataaactcaggaatgatgcagagccgtttacggtgcttatcgtccactgacagatgtcgcttacgcctcatcaaacaccctggacacaacgttgagtgaagcacccctttatgttgtcatacagacctgttttgacgcctgccccttaaccgggcaggcgtttttttatgcatctcgaatgattttgtgtaggcggtaggcccggtaagcgaagcgccaccgggcaagagggaattactgcgggggattgttctgtaatgtcagcatcaggccgtcgcgccgcatggcggcggcctcttccggttgatgcagtcgatcaagcgcatcggcaagccaggcataatcatacgcgtccgggcgttgtttcagcgcggcgcggaaagccagggtcgcctcctgccattcaccgtgtttcattagcgactggccgagcgtgctccataacagcgggcgatcgcctaccgtcttgatttgctggcgcagcactttctccagttgttccggattattggttctgaggcgaggaatgggcagcaccagccgatcgtcatactggcgtttcagaccgtcgatgataatctgctgcgccatatcatgatcgtcacattcgatcagatgctcggccattgcgacctgcagcgccacctgatggcgggttttacggctttggtttttccaccaggtgcgtaatccttcgctgccctgctcggcgcgcgcctgatccatgagtcctatccacgcctgttgttcgagcatagcgcgatgcgcttcatcgccaacgtgcgctttcgccatggatgggatgatatccagtaaagaactccatgcgctggtgcgaatataggcctgctccgccagacgcagaacttccgggtgacgcggcgtgacctccagcagtttgtccacgccgtgacgcgccgcgtgattttcattgcgcgccagctgtaagcgcacgcgcgtgatctcgaccgggatggtgtcgttccccgccagctctgccgcacgttcaaggtgctgattagcgcgcgcttcatcgccgcgctgctgcgctgcttctgccgccagcagataatttaccaccggttgttcagcatgatcggcattttttgacatcagcttttcaacctgctgataatcgccctccgccagcttcagcagcgcctgttcggtctgcttgcgggcgcgacggcgtttacggccggcaaaccaaccgcgggtgtgcgcgccggtacgaaacagacggcgtagtaaccactcaatggcgaatagcaccaccatagcgacgatgagaatgatcgccaggccggtgacgctggtttcaatgttgtagttatcggtctggattaacacatagccctggtgaccggctatcatcgggccgaccacgatacccgcaagcaacaacacaaagagcaataatacttttagcatcattattctccttgcggcgcggctgccggagcgtctgtctgcgtggcaggcgctgccgtagagactgtcggttgcgccagcagattacgcacgcgggtttgcatcagtttttcaagaatcgcctggcttcccagggtttctggcagatccatcgtgatattttgctggcttaatttatcgacctcctccaggaaggcttttgtcgcggcgtcgtcagtatcgtaataagcgcgaacccaggtcgaaacgttatccagcgcctgacggtatgtttcttcctgatggcgtggcacggcctgcgcggcgactaacaggcgggagcgaatattttcgcgtaaatagacgtcctggttgggtgccaacagcggtacggcggtatcatcgcggcggcgaatggtaataaagctgtccataaagttctgccagcttttttgcaggttaacgcgccattcgcttaacgagctggacagctcgctgctgtctgaatccatcggcgaaccatcggtatcgttatccgccagacgcaggttatcgatttggttagagagctgattgagcttgagaataatgccgtcgtagtcgatctgcgcaacggatgacaggctggcgatatcgtcagtaatcgcgcgtcgtgcggtaatcaggctggggtcattcatgtccgccagactggcgtcagcgcttttgagcagcgcagcggcggtagtgacgtcctgatcgctccacagcttgcgtccggcgagtttcaccaggaaatcagcctgcgccagcagccaggttttagcatcgctgccggaaatagtggcgactttttgttgtacttcatcaagctgtttcgccagcgccgcctgttggcgattcgcgtcatctaactgcgccgcttgttttttgataatcccttccagctccgctttttggctctcctgcgccttttgcaaggcggtcagttgcgtcgccagcgcatcgctggtttccgtttgcgcggttgcttgctgtttcccccagccataaagcccaatacctgccgccagggcaatcgcaatcgccaccgcgcttaataccagcgcggcgccgttcttactttttttctcggtattaactggctgtggcgtggtttccacgctctccctggtctcatcaaccacggcggaggatttttcttgttccgtcattatggcatcccattatgagagttattgtaatgcgcgcaacagcgcatcgttgtcggcgttatcagcgaccttaatatcttgccagcccagttcccgggcgaggtgcgccagacgctcactgacgaccaatagccgacagcgtagtaaccagtgctcacgataccactggggagtcagcgaccagagccgttgcaacatctcgccgctggtaacaacaagcgttgttacgccgcgagtatgccagcgcatcgcttcttccgcgccatcgtaatgtttcgcacatcgttgataacattcacaaaaactgacttcggctccgcgcgctgtcagggtttcgcccagcagttcgcggccgccattgccacgcaaaatcagcgcgcgtttgcccgcaatattttgtaattcaggtaattgtagcaaggcttcgctgatttcccgatccaatggataacgaatatcgaacccgctaacggtatgaagggcgagcgccgtggtgcggccaatcgcgaaatagcgcggcgccacaggccagtttcgaccatcccgctggagctgggcgtgagcaaaggcgacagcgtgctgtgaaagggcaaaaaccagatcgttttccgtcagcgtcgccaggcggtcggccagggtgggtagctcccgaccggcgacaaattcaatcagtggaaaactccaggccacctgccccagtgcgcgcagacggctcactaacgcttcccctgcgggagaggggcgggtgatcagaatactcatgcgggcgtctcgccgttataaacttccgtcagaatcgcgcgtgcgccgttttccagcagttcctctgcaagcgagatgcccatttgctccgcctgctcgggagaaccacgacgttcgccgcgcaccatcaccgaaccgtccggcgcgccaaccagcgcgcgtagccaaatttcaccgttgatgatttctgcatagctgccaatcggcacctgacaaccgccttccaggcgggtgttcatagcgcgttccgccgttacgcgcagcgcggtttgcgagtgattcaacggtgcgagcagcgcctgtgttcgcgcgtcgtcaagacgacactcaatcccgacggcgccctggcctacggcaggaagcgaaacgtcgggcggcaaggctgtgcgaatgcgcgactccagacctaagcgtttcagaccggccacggccaggataatggcgtcatagtcgccgttgtccagcttgccgagacgtgtgccgacgttgccgcgcaacgaacggataatgaggtccggacggcgttccgccagttgacactgacgacgcaaactggacgtcccgacgatactacccgcgggcagatcgtccagactgtgatatttattcgagacaaacgcgtcgcgcggatcttcgcgctcgcaaatggtcaccagaccgagaccgtccgggaaggccaccggaacgtctttcatagagtgcacggcgatatcagcacgtttttccagcagcgcgatttcaagctctttaacaaacagtcccttaccgcccactttcgccaggggagtatcgagaatcacgtcgccgcgtgtgaccatcggcaccagttctaccgtcagtcccggatgggttgccatcaatgcgtctttgacataatgtgcctgccaaagcgcaaggggactttggcgtgtggcaattcttaaaacattgtctaacatgcttgttaccgtcattatcaatcattgaccatcctaacatccttatagagagtatgttagttttccggtcaccgtgagtgagaggataaggcgcagtgtcgtcaatgacagtgaataatgacgagaaaccgccagcccgtatttaagaatttacacgcagcgaacggtgctacacttgtatgtagcgcatctttctttacggtcaatgagcaaggtgttaaattgatcacgttttagaccattttttcgtcggtattagataaaaatatgcaggcgagaaagggtaacggttatttttgacatacggtttatcccgaatggcgacggtcaagtactgacctgcaccatgacgggtagcaacatcaggcgatacgtcttgtacctctatattgagactctgaaacagagactggatgccataaatcaactgcgtgtggatcgcgcgcttgctgccatgggacccgcttttcagcaggtttacagtcttctgccgacattattgcactatcaccatccactgatgccgggttaccttgatggtaacgttcccagcggtatttgcttctacacgcctgatgaaacccaacgccactatctgaacgaacttgagctgtaccgcggtatgacgccgcaggacccgccgaagggcgagctgccgattaccggcgtttacaccatgggcagcacctcctcggtcgggcagagctgctcgtccgacctggatatctgggtgtgccatcagtcctggctcgacggcgaagagcgtcagttgctgcaacgtaagtgtagcctgctggaaagctgggccgcctcgcttggcgttgaggtgagcttcttcctgatcgacgagaaccgtttccgccataacgaaagcggcagtctgggcggggaagactgtggttctacgcagcatatcctgttgcttgatgagttttatcgtaccgctgtgcgcctggccgggaagcgtatcctgtggagtatggtgccgtgcgacgaagaagagcattacgacgactatgtcatgacgctctatgcgcagggcgtattaacgccaaacgaatggctggatctggggggcttaagctcgctctccgccgaagagtactttggcgccagcctgtggcagctatacaagagcattgactcgccgtacaaagcggtgctgaaaacgctgctgctggaagcctattcatgggaatatcctaacccacgtctgctggcgaaagatattaaacaacgtctgcatgacggtgaaatcgtatcgtttggactcgatccctactgcatgatgctggaacgggtcactgaatacctgacggcgattgaagatccgacgcggctggatttagtccgccgctgcttttacctgaaagtgtgcgagaaattaagtcgcgagcgtgcctgcgtaggctggcgtcgggaagtattaagccagttagtcagcgagtggggatgggacgacgcgcgtctgaccatgctcgataatcgcgcaaactggaaaatcgatcaggtgcgcgaagcccacaacgaattgctcgacgccatgatgcaaagctatcgtaatctgattcgctttgcgcggcgcaacaacctcagcgtgagtgccagcccgcaggatatcggcgtactgacgcgtaagctgtacgcggcttttgaagcgttgccgggtaaagtcacgctggtgaacccgcagatatcgccggatctgtccgagccgaatttaacctttatccatgtgccgccgggacgcgccaaccgttcaggctggtatctctacaaccgcgcgccgaacatggattccatcatcagccatcagccgctggaatataaccgttatcttaataagctggtcgcgtgggcgtggttcaacggcctgctgacgtcgcgaacgcatctgtttattaagggcaacggtattgtcgacctgcctaagttacaggagatggtcgccgatgtttcgcaccatttcccgctgcgcttgcctgctccgacgccgaaagcgctctacagcccctgtgaaattcgccatctggcgattatcgttaacctcgaatatgacccgacggcggcgtttcgcaataaagtggtccattttgacttccgtaagctggacgttttcagctttggcgaagagcaaaactgtctgataggcagtatcgacttgttatatcgcaactcgtggaacgaagtgcgtactctgcactttaacggcgagcaggcgatgatcgaagcgctgaaaacgattctggggaaaatgcaccaggatgccgcgccgccggatagcgtggaggtgttctgctacagtcagcatcttcgcggcctgattcgcacccgtgtgcagcaactggtctccgaatgtattgagctacgtctttccagcacccgtcaggagaccggtcgcttcaaggcgctgcgggtttccgggcagacgtgggggctattcttcgaacgcttgaatgtctcggtgcagaagctggagaacgctatcgaattctacggcgcgatttcgcataacaagctgcacgggctgtcggtacaggtggaaaccaaccaggtgaaattgccgtcagtggtggatggcttcgccagcgaagggattatccagttcttctttgaagaaacaggcgatgagaaaggctttaacatttatattctggatgaaagtaaccgggcggaagtatatcaccactgcgaaggtagcaaggaagaactggtgcgcgacgtcagtcgcttctattcgtcatcgcacgatcgcttcacgtatggctccagttttatcaactttaacctgccgcagttctaccagatagtgaaaaccgatggccgcgcgcaggtgatcccattccgtacgcagcctatcaacaccgtgccgccagcaaaccaggatcatgacgcgccgctattgcagcagtatttttcgtaagtgctgcgccgggcaaagctgcccggccggcgttcaccgcttcacattaacttcacccaacttcgttaccgtgacctccgcatttggtttacaggaggaggtttgaggtggcagatgcgttcattttgttagggatagtcatggcgatggtcagcctcggcttcattcttataaataagttattctgttttatatctgctgggtgcctgctctcgttatgcgccagcatggccagttttcaactctgggatgcatcttactgggggcgatggggaaaagtatgtcccggcctggatgtgatcatctcctgcgacaattaccattttctctatgacttgggatgggaattgtacggtatcgcctttttgttctttaccgcgttaatgctcacatgtgcggccattattcttatcaatatgattatggctttagagcgatactgtgccggatggcggcgctaacgcgccttatccagcctacattcgaagaatgctcattgagcggaacaaggtttagataatattttttcttatacaatttatgtagtaatattcagaccgttcaaaatgctatcgcgtccttcattgttttcgtaaatatgttttgaaaaactatattagaaacaaaagctctttaatggtttcttatggatgtttttataaaaggatattatatgtcaataaacaaccctattcttatttgcgtgaataagaaacgacaaataaaattagctctgttttattcagtggtagctatagctcttatgatgagcctctttctaaattatagtattatgctaaagatggtgtgtgtttttttaatactcctcatgatagcaggcgcaagtgcttactggtactccgccttttcaggaaagccacagctaacgttgaaccaggagggagtaacattacacacaaccaggctaccaatagtttactggcatgaaatcgactatgttggtgagcgtgttagcgataatacgcctgtgctggccatttttgtcaaagatgttgagctttattgtcagcgaattactaatgagaaaatgcgtaataattttctgtcattattgaataagcatgaaagtaatcgcgtgatgaatatctctctaaacgatctcgattatgactcagatgagttacaggatatttttaaaatggctgttgccagaaacctggaacaatagggtagagatatatgttttttgttattactcaccatattgatgtgctgcctctggcaaccctacccacacatgaaacatgcccttattgtaataatcaggatgtatggttgattattcgccaaaaaaggacccgtacatgtggtctgtctcaagcgagaaaaagagataagtttggtttagcgatatgcaatcattgcagcaatgaaatcaaggaaaaacgttggtcaccagcgttacgtcaactttttaccgagcagaagccactatttaacctaaccttttggcaacgctacggtttttgggttggttggttgagtgtatggcccgcgctgtttctggcaacctggctgtatttcacatttcggggttggtaatacgaccgcatatctcgttaaatatacgcaggaaagcgctattcttctggctctcctgcggaattaaaacttagcgaaaactcaccttttcacccgcttgttgcgttgccgcctgctccagcagatcccagaaggtttcgccgctgcgatcgcaaacccactcgtcgcctttcagatcgaaatgatagccgccctgtttggtcgccagccacacctggtgcaacggctcctgacggttaataatgatgttactgccgttctcaaagctgagggtcagcacgccgccgttgatttcgcagtcgatatcgctgtcgccgtcccagctatcgaggcgttcttcaatggtgagccacagggcgtcagccaggcgatgaaattcactgtcgttcattgttttatcccgctattgagtgatagcgccagtataaggggaagcgtcagcttctggaaccgatacgaattaccgttgtgagcggtaaaggataaaactcagcggtaggtaaatgacgataaatagcgcaccggtgataagtatgacggacgcgttaaccgggaaatggttcagagccgacagcattgccaccatcagtgcgacgcagccgccgcagaggagaaaatgcaacaggattaagggggcgcgcggctttgctttgatatccaaaagagcgctaagcagaccgagtaccgcgcttatcgtcaggactccggcagcttcaacaccgtttatcgtgccgtgcataatgctttcaataatgacgtaaatgcatgaaccgatccccacgccccgaagggcgtttttcaaatgtttaatcaagtgcgcaaaacggtttagcggcgtcatttttggcattccggtgcctgcgttatgatgatgatgtctttattgttggtgtacatgacgttcctattcagagtatgcgtcttatccgggcagggggatgctgttcggtaaagctggctgccaatccacgtataaactagcggttgtcatacgcaaaacgctcggtgacttttagcggcccattgatgctaaagacatgaataccctgaccttgctggctatcacgcataaaatagccatgctcttttccggcgttaatttcccggttcaggaagggggttgcgctatccagttccagccctgagttgccgggttaatcaatgaattgggtaaccgacgcaggcgtttgaaactcacctccggcaacgaaagattgttctcctcttctggctggagataaaccacgccgctgccttgccgctgataaacattgtgcggagattcactcagccggcatccccaggcgggaggcagcagaagtgaaagcgaaaaaaggcaaaacaaattacgatattgcataaggtcatccggacgtggtacgtaaacctaaagtgatgagcaaagcatgtttcctgatgtaaatgcgcaataatcatggcaacgcgccgcttttcagattttataaagagcccctaaacgcttgcttttacgccttctcctgcgatgatagaaaatagaaagcatgaacttacaggcaatccataatgaaaaacgtgtttaagacactcgctgtacttctgactctgttcagcctgacgggctgcggtttgaaagggccgctttatttcccgccagccgataaaaatgcgccgccgccgacgaaaaaagtcgattcgcaaacgcagtccacgatgcccgataagaacgatcgcgcaacgggagatggcccgtcccaggtcaattactgaggatagttttctgtccccgcgtgaacggagtgaatgatgcaattctctaaaatgcatggccttggcaacgattttatggtcgtcgacgcggtaacgcagaatgtctttttttcgccggaactgattcgtcggctatccgacagacacctgggcgtagggttcgatcagctgctggtggttgagccgccctatgatcctgagttggactttcattaccgcatcttcaacgccgacggcagtgaagtctcgcagtgcggcaatggcgcgcgctgtttcgcgcgatttgttcgcctgaaagggctaaccaataaacgcgacattcgggtcagtaccgcgaatggccggatggtactgagcgtcacggaagatgaactggtgcgggtgaatatgggggaaccaaactttgaacccgcgcaggtgccttttcgcgccaacaaagcggaaaagacgtatattatgcgagcggcggaacagaccatactgtgcggcgtggtttcaatgggcaatccgcactgtgtcattcaggttgataacgtcgacacggcggccgttgaaacactggggccggttctggaaagccatgagcgttttccggaacgcgccaacattggttttatgcaggttgtaagacgtgagcatatccggctgcgagtctatgaacgcggcgcaggggagacccgcgcgtgcggcagcggcgcgtgcgctgccgttgccgtggggattcagcaggggctgctggctgaagaagtacgcgtggaattaccgggcggtcggctggatatcgcctggaaaggtccgggtcatccgttatacatgactggtccggcggcacatatctacgacggatttatccatttatgaagcaaccagaggaagaactacaggaaacgctcacggaactggacgatcgagcggtcgtcgattacctgcgccaccaccctgagttttttatccgtaacgcccacgccgttgaagcgatgcgtgttccacatcccgtgcggggaacggtttcgctcgttgagtggcatatggcccgcgcgcgtaatcacatcaatgtgcttgaagaaaatatgacgctgctgatggaacaggctcatgccaatgaaagcctgttttatcgcttgctgcatctgcaaagccgtctggtcgccgcggatagtctggatgagatgctggtgcggtttcaccgctgggcgcgcgatttggggcttgccggcgcgacgctgcgtttgttcccggatcggtggcgtcttggcgcgccatcgcgctatacacatctggctttaaaccgtcaggcctttgagccgctgcgtattcaacggctgggacagtcgcagcattatcttggcccgctaaacggcccggaactgctggtggtcttgccggaggcgaaggctgtaggctcggtagccatgtcgatgatgggcagcgatggcggcctcggggtgattctcttcagcagccgtgacccgcatcactatcagccgggacaggggacgcagcttttacaggagatcgcgctgatgctgccggaactgctggaacgctggattaaacgcgtatgacggatgtcgcgctttctcaggatgtctcgcggttcctgcgctatttaggcgtggagcgccagcttagccccattaccctgctgaactaccagcgtcagcttgatgccattatcgctttagccggagaaaccgggctgaaaagctggcaacaatgtgacgctgcgattgtgcgcagttttgcggtgcgcagtcggcgcaaagggcttggccctgccagtctggcgctacgtctctcggcattgcgaagcttttttgactggttagtcagtcagggcgaattgaaagctaacccggcaaagggtgtctccgcaccgaaagcgccgcgtcatctgccgaaaaatattgatgtcgacgacgttaaccgcctgctggacatcgatcttaacgatccgctcgccgtacgtgatcgggcgatgctggaggtcatgtacggcgcggggctgcgtttatccgaactggttggcctggatataaagcacctcgatctcgataccggagaagtgtgggtaatgggtaaaggcagcaaagagcgacgcctgccgattggccgtaacgcggtgacgtggattgagcactggttggatctgcgcggcctgttcgccagcgatgaagaggcgttattcctgtcgaagctcggcaagcgtatctccgcgcgcaatgtccaaaaacggttcgccgaatggggcataaagcaggggctaaacagccacgtgcatccacataagctgcgccattcgttcgcgacccatatgctggaatcgagcggcgatctgcgcggcgtgcaagagctgctgggtcatgccaacctttccaccacccaaatttatactcatcttgattttcaacatcttgcttcagtgtacgacgcggcgcatccgcgcgctaaacgggggaaataatgcgtttttaccggcctttggggcgtattgccgcgctcacctttgacctggatgataccctttatgataaccgtccggtgattttgcgtactgagcaggaagcgctcgcttttatgcagaattatcacccgtcgctacgttcgtttcaaaacgtcgatttacagcggatacggcaggcggtgcgtgaagcggagccggaaatctatcatgacgttacccgctggcgccatcgcgcgatagagcaggccatgcgggatgcgggattatcggcgcaggaggccattgccggcgcgaatgcggcgatgatgcattttgccaaatggcgcagccagattgaggttccgcaggctacccatgagacgttacagcagcttgcgaaaaaatggccgctggtggcgatcactaacggcaatgcccagccggaactgtttggcctcggcgattactttaagtttgtactgcgcgccggcccggatggacgttccaagccctttagcgacatgtatttcctggcggcggaaaaactgcatgtgccgatcggcgagatcctgcatgtcggcgatgatctgactaccgatgtggctggcgctattcgctgtgggatgcaggcctgctggattaaacctgaaaatgccgacctgatgcggacgcaggacagccgtttactgccgcatatcgaaatttcgcggttggcatctctcacctcgctgatataatcaccagtagttctgtataaattcccagttattctggcggatggcgctatgcttatccgccctacgataagtagccccggtaagcgaagcgccaccgggcgtttttagttttcatgtttttacgcggcggtgccaatggacgtttcttacctgctcgacagccttaatgataaacagcgcgaagcggtggccgcgccacgtagcaacatgctggtgctggcgggcgcgggaagcgggaaaacccgcgtgctggtgcaccgtatcgcctggttactgagcgtagaaaacaactcgccatattccatcatggcggtgacctttaccaataaagcggcggcggaaatgcgccatcgtattggccagttgatggggaccagccagggcggaatgtgggtagggacgttccacggtctggcgcaccgcctgctgcgcgcgcatcatatggacgctaatttgccgcaggatttccagattctcgacagcgaagatcagatgcgtttgcttaaacgcctgattaaggcgatgaatcttgatgagaagcagtggccgccgcgtcaggcgatgtggtacatcaatagccagaaagacgaagggctacgcccgcaccatatccaaagctatggcaacccggtggagcagacctggcagaaggtgtatcaggcctatcaggaagcgtgcgatcgcgctggtctggtggattttgccgagctactgctgcgcgctcatgaactatggctgaacaagccgcacatcctgcaacactatcgcgagcggtttactaacatcctggtggacgaattccaggataccaacaacattcagtacgcctgggttcgtctgctggcgggcgataccggtaaggtgatgattgtcggcgacgatgaccagtcgatctacggctggcgcggggcccaggtagagaacatccagcgcttcctcaatgatttccccggcgcgcagaccattcgtctggagcagaattaccgctcgaccagcaacatccttagcgcggcgaacgctctgattgagaataacaatgggcgtttgggtaaaaagctgtggactgacggcgttgacggcgaaccgatatcgctgtactgcgctttcaacgaactggatgaagcgcgctttgtggttaaccgtatcaaaacctggcaggacaacggcggcgcgcttgcgcaatgcgccattctttatcgcagcaacgcccagtcgcgcgtgctggaagaagcgttattacaggccagtatgccgtaccgcatttacggcggtatgcgcttcttcgaacgccaggagatcaaagatgcgctctcttatctgcgtttgattgccaatcgcaacgatgatgccgcctttgaacgcgtggtgaataccccaacgcgcggtatcggcgaccgcacgctggacgtggtgcgccagacctcgcgcgatcgccagctaacattgtggcaggtgtgccgtgaattgttacaggaaaaagccctggccgggcgtgcggccagcgcgctgcaacgctttatggaactgatcgacgccctggcgcaggaaaccgccgacatgccgctgcatgtgcagactgaccgggtgatcaaagattccggcctgcgcaccatgtatgagcaagaaaaaggcgagaaaggccagacgcgcatcgaaaacttagaggaactggtgacggcaacgcggcagttcagctacaacgacgaagatgaagatttgatgccgttgcaggccttcctctctcacgcggcgctggaagcgggcgaggggcaggcggatacctggcaggatgcggtacagctgatgacgctgcactcggccaaaggcctggagtttccgcaggtgtttatcgtcgggatggaagaggggatgttccccagccagatgtcgctggatgagggcgggcgtttggaagaggagcgtcgtctggcctacgtcggcgttacccgtgccatgcagaaactgacgctaacctatgccgaaactcgccgtctgtatggtaaagaggtttatcatcgcccgtcgcgtttcatcggcgagttgccggaggagtgcgtggaagaggtccgtctgcgcgccaccgtcagtcgtccggtgagccatcaacgaatgggaacgccgctggcggaaaacgacacaggctacaaactcggccaacgcgtgcgccatgcgaagttcggcgagggaactattgtcaacctggagggcagcggcgagcatagccggttgcaggtggcttttcaggggcaagggatcaaatggctggttgccgcgtatgcgaagctggaaacggtttgaccgactctcatagtgccggatggcgcgtcttatccggcctacgcgctggctaacattttgatttgtaggccggataaggcgaagccgccatccggcgatatattgatgttaatattctgaaatcatagataaatactctcactctgctaacctttctgcataaggggaaattattgctttttcgcgtttcgttgcgtgttgacggcaaatttttgctggcgtaacatgcgcccacgattacgctaagaggacattcgccttggacacacccagtagatactggctcattatcctgtcatccaggatcaactcctaaggctatccctttttgctgatagccttagcggttgtcagcgacctttcattttttcccgtcgcgttgagtcaggctgtttaatggtctgaaacccaatttgtttctgtgtgcccatctgaactgtccgatatttttacgcattgggagtcccggtcatgctgagcgcatttcaactggaaaaaaaccgactgacccggctggaagtcgaggagtcacaaagcctgattgatgccgtatgggtcgatttggtcgaaccggacgacgacgagcgattgcgcgtacaatctgagctgggccagagtctggcgacgcgtcctgaactggaagatatcgaagcatccgcgcgcttctttgaagacgaagacggactgcatatccactccttcttcttcttcgaagatgcggaagatcatgccggtaactctacggtggcattcactattcgcgatggccgtctgtttacgctgcgtgaacgcgaactgcccgccttccgtttgtatcgtatgcgcgcccgcagccaggcgatggtcgacggtaatgcttatgaattactgctcgatctgttcgaaactaaaattgaacagttggcggatgaaatcgaaaacatctacagcgatctggaaaaactgagccgcgtcattatggaagggcatcagggcgatgaatacgacgaagcgctctccacgctggcggaactggaagatatcggctggaaggtacgcctgtgtctgatggatacccaacgcgcgctgaacttcctggtgcgcaaggcgcgcttaccgggcggacagctggagcaggcgcgtgagatcctgcgcgatatcgaatctctgctgccgcacaatgaatcgctgttccagaaggtgaacttcctgatgcaggcggcgatgggtttcatcaacatcgagcagaaccgtattatcaaaatcttctcggtggtttccgtggtgttcctgccgccgacgctggtcgcttccagctatgggatgaacttcgagtttatgccggaactgaagtggagctttggttatccaggcgcgattatctttatgattctggcggggcttgcgccgtatttgtactttaagcgcaagaactggctgtaagacattaaggccagggtgattcagctgcggctgaaccaccctgaaaagttacaggctccaggtattgatacctttaacctctttttcatagaaccacttatttgtattgacgccgacataagctgcgacaacaagtccaagtatgttaacgccgattaatgctccaataaatattgcaacgatccctaataaaataactataattgcttttttccacagacccagtacaaacaaataaatccatgagaagaaaaaggcaataaagtttatttgaatagtcaaccgttgtcggggctttaatgctttaaatgcctgtttatattctgggcttactttccaaaatccagggaaaccatgttgatcgtaaaatgaaaaacggtatttccatttttcagatagcgaaccatcattaatataatccttgtccatgtaaactccattaaattacttgttgagtgaattcgaatccgggggggccagaagtagcagagaaaaggttgcaaaataccagattagaaaaagaggcataccaaagccatcgcaagcgaaatcttcagcaaccattatcacgaaggaggcaatatagattacaagcgtaccccatacatagaattttatatattcaaagccactgtctctgaatcgctgacagtttaaattaatgacgagataatgtagtaaaattgtgaataaaattgccagtatcacaaagcttaaatataataaaaccccaaccaaaatggaaaatattatatttattagcgcgaatgataataaataacgacatctggaaacacatctctcagatgaaggaataaaaacacttaacattaatttcacatccatatgttgggttacgtcgttagcatgacaatatgctaccccccttacaaggggaggcatattttttcagattatatttagaataatagtcgcgttattttttacgctgcgtataaatcgcatccatcacgaaaatcgccagcgcgacccagataaacgcaaatgtcaccatcttatccgcgcccggcacttcgccataaaacgtcaccgccagtaaaaacatcagcgttgggccgatatactggaaaaagcccagtgtagaaagacgcagacgcgtagccgctccggtgaagcacagcagcggaatcgtagtgaccacacccgccgccattaacagcaagttcaacgatagtgcgttttgccccatatggctggtagggctatcggcgatgccaaacagataaatcgcggcgaccggcaacagccatagcgtttcaaccagcatacccgtctgcgcttcaacggcgatcttcttacgcaccaggccgtaaaacgcaaaactaaacgccagccccagcgcgataatcggcagcgagccaaaggtccagagttgcaccagcacgccgcacaccgccagaatcaccgccagccactgcattcgacggaagcgttcgccaagaaaaatcatccccagcaagatgttaaccagcggattaatgaaataacccaggctggcctccagcatatggtgattatttaccgcccaaatgaacaatagccagttaccgccgaccagtacggcggacagggccagcaggaaaatcttctttggcgttttcagtaagcgcttaacctgtcgccactgccggctgacgctaagcagcgccaccataaagaaaaatgaccaaatcacgcggtgcgtcaggatctcatctgcgggaacgtaatagatcagcttgaaatacgcgggggcgatcccccaaataaaataggcggcaagagcgagtaatacgccctgccgtgtttgttttgcgtccatccggaaaactcgtatctgaagtgtaacaacagtttacctgcttttatcccaccatataagtagcggtggcgctggcgatgtacagctgatcttcattgtgtaattccacgcgggcgacggccactttattccctgcgcgcagcaggctactggtggccgtaaagcggttgcctctgcccggacgcaggtaatcgacgcgcaggtcaatcgttcccatccgcgacaggcgctggcgtagttcatcttcgctgatggtttcgtggcgagttagcgtgctgccgacgcataccagtccggcggcgacatccagcgcagaggcgatcacgccgccgtgtaaaatgctttgcgcccagttgccgaccatcatcggctggttgttgaaggccagttgggcgaacgctttttcatagcgttccagctccagccctaacgcccgattaaacggcatgtggtagacaaacatttcacccactaatttcagagcttgttcagcggtaagtacagcggacatagattcctgacacctcattagttaatgaaatgttgatattatgcttcttaattgttgttttctactttaagaagggataactaacggctatgtgtgtaaatatgtaaaaatggttggcagagaatgattcaagctgaaaatacttcgtcaggagaacgtcaagaatgcgggcgattttgagagggttgttgccagccacgctactgccattagcggcatatgcacaagaagctacgataaaagaggttcatgatgcgcctgcagtacggggaagtatcatcgctaacatgctacaggagcatgataacccttttacgctttacccttatgacacgaactacttgatctacacgaacaccagcgatctgaacaaagaggccataagtacctacaactggtctgaaaacgcacgtaaagatgaagtgaaatttcagttgagcctggcgtttccgctgtggcgcggaatactggggccgaactcggtactgggcgcttcctatacgcagaaatcctggtggcagctttccaacagtaaagagtcttcgccgtttcgcgaaaccaactacgaaccgcagctttttcttggttttgctaccgattatcgctttgccggctggacgctgcgcgacgtagagatgggctacaaccatgactctaacggacgttcggaccccacctcgcgtagctggaaccgtctgtatacccgtctgatggccgaaaacggtaactggctggtagaggtcaaaccgtggtacgtgattggcagtaccgatgataatccggacatcaccaaatatatgggttattaccagcttaaaatcggttatcacctgggcgaggcggtattaagcgccaaaggccagtacaactggaatacaggctacggcggcgcggaagttggattaagctatccggtcactaaacatgtccggctttatacccaggtgtacagcggctatggcgaatcgctgatcgactataattttaatcagacacgtgtcggcgtcggcgtgatgcttaacgatatcttctgattggattgtgttttaaacattgcagtttctctcgcaggcgctgaaaatagcgcctgttttgatttatggtgaacggggttaatgtggcgcaggcggaagtgttgaatctggaatcaggggccaaacaggttttgcaggaaacctttggctaccaacagtttcgcccgggtcaggaagcgattattgatactgcgctctccggtcgcgactgtctggtcgtcatgcccaccggcggcggcaaatctctgtgctatcaaatccccgcgttgttgctggacgggttgactgtcgtcgtttcgccattaatctcgttgatgaaagaccaggtcgatcagctactggcgaacggtgtggcggcggcgtgcctgaactccactcaaagccgcgagcagcagcttgaggtgatggcggggtgccgtaccggacagattcgtctgctgtatattgcgccggaacgcctgatgctggacaactttcttgatcatctggcgcactggaatccggtattgctggcggtggatgaagcgcactgtatctcgcaatggggacatgatttccgtccggaatatgcggcgctcggtcagcttcgccagcgttttcccgctttgccgtttatggcattgaccgccaccgccgacgacaccacgcgccaggatattattcgtctgcttgggcttaacgatccgttaatccagattagtagctttgaccgaccgaatatccgctacatgctgatggagaagtttaagccgctcgaccagttaatgcgctatgttcaggagcaacgcggcaaatcgggtatcatctactgtaacagccgggcgaaagtggaagataccgctgcgcgcttgcaaagtcgcggcattagcgcggcggcctatcatgcggggctggaaaacgctattcgcgtcgatgtgcaggaaaaatttcagcgcgacgatctgcaaatcgtggtggcgaccgtcgcttttggaatgggcataaacaaacctaacgtacgtttcgtcgtgcatttcgatatcccgcgcaatattgaatcctactatcaggaaacgggccgcgccgggcgcgacggactgcctgcggaagccatgctattttacgatccggctgatatggcctggctacgtcgttgtctggaagagaaaccagccggacagcttcaggatattgaacggcataaactgaatgcgatgggcgcttttgctgaagcgcaaacctgccgccgcctggtattgcttaattactttggcgaaggccgacaagaaccgtgcggcaactgcgatatctgtctcgatccgcccaaacaatatgatggcttaaacgatgcccagattgcgctttctaccattggtcgggttaaccagcgttttggcatgggctacgttgtcgaggtgatccgcggcgcgaataaccaacgcatccgcgatttcggtcatgacaaactcaaggtttatggcatgggacgcgaaaagagccatgagcactgggtgagcgtgattcgccagctcattcatctggggctggtaatgcaaaatattgcgcagcactccgcattacagttgacggatgccgcgcgtccggtactccgtggagacgttccgctaaagcttgcggtgccgcgcatcgtcgccctcaaaccccgcgtgatgcagaaatcgttcggcggtaattacgatcgcaaattgttcgctaagttgcgcaagctgcgtaaagctatcgctgatgaagagaatatcccgccgtatgtggtctttaacgacgccacgttgatagaaatggcggaacagatgccggtttccgccagcgagatgttaagcgttaacggggttgggatgcgcaaactggagcgcttcgggaaagaatttatggcgctcatccgcgcgcatgtcgatggtgatgacgaagagtagtcagcccggcaaaaaagtgccaggatggtgactcactgaactatttccccgcgagccatttttatgatgatgctatttttcaccgtggcaatggtgcacatcgttgcgctaatgagccccggccccgactttttcttcgtgtctcaaactgctgtcagccgttcgcgtaaagaagcgatgatgggcgtactgggcatcacctgcggcgtgatggtatgggcgggcgtggcgctgcttggcctgcatctcatcatcgaaaaaatggcctggctgcatacgatcattatggtaggcggcggcctgtacctgtgctggatgggctatcagatgctgcgcggcgcgctgaaaaaacaggatgcggcggcgtcttctccgcacattgaactggcgcagagcgggcgcagctttctcaaagggctgctgaccaatctgtcgaatcctaaagcgattatctattttggttccgttttttcactttttgtcggcgataacgtcggcgctgcggcgcgctggggtattttcgcgttaatcaccctggaaacgctggcctggtttaccgtagtcgccagcctgttcgcgctgccgaaaatgcgccgtggctatcagcgtctggcgaaatggattgatggctttgccggcgctctgtttgcgggctttggtattcacctgattatttcgcgctaatttacctccgggccggataaacatcatccggcacgactatcacgcgtgtcttgccgacgccaggagcgcgcctaccagcataaacaacgaaccaaacgctttattcagcgccttcatctgctttggtcctttaatccaggcggcaatgcgctgcgccagtgtggcgtaaccggtcatcacaaccatatccaccacaatcgtggtgacgccgagaatgaggtactgcgccagttgcggttgctgcggcatgatgaattgcggaaacagggcggcaagaaagacaatacttttgggattggttagattgacaaatatcgcccgtttgaacagccgaccccgcgattgcgtctgggcgagggtatgcagatcgatagcgcctgcggcgcgccattgctggatacccagccagataagataagccgcgccagcccatttcagaatttcaaaagcgaggagcgagcgcgaaaagagcgtacccagtccgacgcccaccagtacgatatgtatccccagcccggtctggagtccggcgatagaagccactgcgccacgatatccatggttgatagacgtcgtcatggtattgatggcgcctgaacccggagaaagactcagcagagttgaggtcagtagataggcgaaccaccattcaaaggtcatgcgaaactccctggttgtctgtttttgtgccacaatacgctactgccgctgtgttgtgtcaggcacgacgcaaaaaacgattttacctggtaaacgaggccgaaaacccgatgtttcagcagcaaaatgactgggaaacaagagaaaatgcgtttgccgcttttgctatggggccgctgaccgatttctggcgtcagcgggaagaggcggagtttatcggcgtgggtaacattccggtgcgctttgtccgttttcgaaatgattccaacgatcggacgatcgtcatttgtcctggccgcattgagagttatgtaaaatacgctgaactggcgtatgacctttttcatctcggttttgatatcttcatcatcgaccaccgtggtcaagggcgctccgggcggatgttatcggacccgcatcggggtcatgtcgatcattttaacgattatgttgaggacttagcggcgttctggcagcaggaaattgagccggggccgtggcgtaagcgttatatcctggcgcactcaatggggggcgcgatagccaccctgttcctgcaacgccatcgtgtgcggtgcgacgctattgcgctcaccgcgccgatgtttggtattgtgatacgcttgccttcctttatggtgcgccatattctcgactgggccgaagggcaccagcgtatccgtgaagattacgctattggtaccggtcagtggcgggcgttgccgtttgggatgaatgcgctgacccacagccgccagcgttatcagcgcaacttacgattttatgccgacgagccgcagctgcgcgttggcggccccacctggcattgggtacgcgaaggcattctggcgggtgagcaggtactggctggggcgagcgatgacacgacgcctacgctactgattcaggcggaagaagagcgggtagtggataaccgcacccacgatcgtttttgtgaaattcgcgccgcggcgggatacccttgtgaagggggaaaaccgctggttatcaaaggcgcgtaccatgagatcctttttgaaaaggacgccatgcgctcagtcgcgcttaacgccattgttgaatttttcaacaagcctaatttatccagcggaaatcgctttgcttagaggttaaattttattatgtatcaggttgttgcgtctgatttagatggcacgctgctctcccccgaccatacgttgtccccttatgccaaagagactctgaagctgttgaccgcacgcggcatccattttgtctttgccactggtcgtcatcatgtcgatgtagggcaaatccgcgataatcttgaaatcaagtcttacatgatcacctccaacggcgcgcgagtgcacgataccgacgggaatttggtttttacgcataatctggacagcgacattgccagcgacctgttcggggtggtgaatgcgaacccggacatcgtgactaacgtttatcgcgacgacgaatggtttatgaatcgtcatcgccccgatgaaatgcgttttttcaaagaggcggtatttaactactcgctgtttgagcctgcgctgctggagccggagggcgtcagcaaagtgtttttcaccagcgacactcatgaaaagttgttgccgctggagcaggcgattaacgcgcgctggggcgatcgggtaaacgtgagcttctctacgctaacctgtctggaagtgatggcgggcggagtgtcgaaaggtcatgcgctggaagcggtcgctcaggcgatggggtacagtctgaaagagtgtatcgcctttggcgacggaatgaacgacgctgaaatgctcacgatggcgggcaaaggctgcatcatgggcaatgcgcaccagcgtctgaaagacctgtatcccgaacttgaggtgatcggcatcaacgcggataacgccgtgccgcattacctgcgcgatcttttcttacgctgatgtgattgtttgttagttgaccagttgtcaacttcactctccgctacaatgggtgttccctgttttaagagacatccattgtggcgctactcatcattaccactatcctgtgggctttctcctttagtttatttggcgagtatcttgccgggcatgtcgatagctatttcgcggtgctgatacgcgttgggctggcggcgctcgtttttctgccgtttttgcgtactcgcgggcacaacctaaaaaccatcagcctgtatatgctggtgggggcgatgcagcttggcatcatgtatatgttgagcttccatgcttacctctacctgaccgtatccgaactgctgttgtttaccgttctgacgccgctctatatcacgctgatttacgatgtgatgagtcagcgtcgtttgcgctggggctatgcatttagcgcgttgctggcggtgattggcgccgggattattcgctacgatcgcgtgaccgaccatttttgggtcggtttgctcctggtgcagctttctaatatcagtttcgctatcggaatggtggggtataaacgtctgatggagacccgtcccatgccgcagcacaacgcctttgcgtggttctatctgggggcgtttttggtggcggcggtggcgtggtcgctgttggggaacgcgcaaaagctgccggaaaccacgctgcaatggagcattctggtgtttctcggcgtggtggcgtcaggcattggctactttatgtggaactatggcgctacccaggtagacgccgggacgctgggtatcatgaataacatgcatgttcccgcaggactgctggttaatcttgccatctggcatcagcagccccactggccaagctttattacaggcgcggctgtgatcctggcttcgctgtgggtgcatcgaaaatgggtcgctccgcgctccgcacaaacggcagatgatcgcaggcgtgatcccgcgtcgagcgaataaacgcctcggtcaccgcctgacgctggtcgccgtcgcgcacggcggcatacaggcggctccacagaccatctccaagggttttggtcaccaccagaccctggcgctcaacgctttccaccacccagtgcggcagggcggcaatacccattctggccgccaccatctgaatcagcagtagcgtattatccacgcttttcagcagcggactgatacccgccggttgcaggaaatgtcgccagacatccagtcggctgcgctgcaccgggtaaatcaacagcgtttcgctggctaaatcttccggcgtaatctgcgttttgctggccagcggatggtcgggcgccagcaccagtcggacttcaaaatcaaacatcggcgaataatgcagtccgctacgcggcaaaatatccgacgtcatcaccaaatccagctcgccttgttgcaaggccggttgcggatcaaaagtgacgccggaggtgaaatccatttctacctgcggccagcttgcacggaagttttccagcgccggggtcagccactgaatacagctatgacattcaatagcgatgcgcagacgagtttgctgcggttcgttgcacgcctgcagcgcacggctgatttgcggcagcacttggtttgccagttgcagcagaacttccccctgcggcgtaaagcgcagcggctggcttttacgcacgaacaggcggaagccaaggcgttgttccagatcgctgaactgatgagacagagcggattgggtctggtgcagcaccgccgccgcggcagccagcgatccactattccgcaatgcctggagtgttttcagatgtttaatttcgatcatgaaagtccttcacttcgccatgaacaaattgcgcttgaggaatatacagtacctttacattatggatgtgtaaacatccagacgtctaaaactcgtcatatttcgacttgcagatgcgttggcttccttgcttaccccagtcacttacttcagtaagctcctggggatgcgctgtgtcgccgccttcctgcaagccgaactatttagagttttactttcagattcaataaaataagagaggaagtaaaatgacaatattgactcatacccttggttttcctcgcgttggcctgcgtcgcgagttgaaaaaagcgcaagagagctactgggcggggaacacaacgcgtgaagcgttactggcggtggggcgcgaactgcgcgcgcgtcactgggagcagcagaaacaagcgggtattgacctgttaccggtaggcgactttgcctggtacgaccatgttctgaccaccagcctgctgttaggcaatgtgccggctcgtcatcagaacaacgacggttccgtggacatcgacactctgttccgcattggccgcggtcgcgcgccaaccggcgaaccggcggcggcagcggaaatgaccaaatggtttaatactaactatcactacatagtaccggagttcagcaaaggccagcagttcagactcacctggacacagttgctggaggaagtggacgaagcgctggcgctggggcataagatcaaacccgtactgctggggcctgtcacgtatctgtggctgggtaaagtgaaaggcgagccgtttgaccgcctgacgttgctgaaagacattttgccggtgtatcagcacgtactggctgaactggcaaaacgtggtattgagtgggtccaaattgatgagccagcgctggtgctggaactgccgcaggcgtggctggatgccttcaaaccggcttacgacgcgctcgccggccaggtgaagctgttgctgacgacctattttgaaggcgtgacgccaaacttggacactattatcgcgctaccggtacaggggctacatgttgacctcattcatggcaaagatgatgtagcggaactgcatcaacgtctgccggtcgactggctgctctccgcaggcttgattaacgggcgtaatgtctggcgcgccgatttgaccgaaaaatacgcgcagattaacgccattgtgggcaaacgcgcgctgtgggtagcatcctcctgctctttgctgcacagcccgatcgatctcagcgtcgaaacgcgtctggatacggaagttaaaagctggtttgcctttgcgctgcaaaaatgcggtgaactggcgttgctgcgcgatgcgctgaacagcggcgaaacggcggcgcttgaggaatggagcgcaccgattcaggctcgtcgtcactcccgccgcgtacataatgccgcggtagaaaaacgcctggcggcgatcaccgcgcaggacagccagcgtgagaatccgtatgaggtgcgcgctgaagcgcaacgcgcccgctttaaacttcccgcctggccgacgacgactatcggttcgtttccgcaaaccacggagattcgcggtctgcgtctggacttcaaaaagggcaacctcgacgcgaaccactaccgcaccggcatcgccgaacatatcaaacaggctatcatcgagcaggagcgtttagggctggatgtgctggtacacggcgaagccgagcgaaacgacatggtggaatacttcggcgagcatctggacggcttcgtctttacccagaatggttgggtgcaaagctatggctcccgctgtgtgaaaccgccggtagtgattggcgatatcagccgtccggcaccgattaccgtggagtgggcgaaatatgcccagtcgctgaccgacaagccggtaaaagggatgttgaccggcccggtgactattctttgctggtcattcccccgcgaagacgtgacccgcgaaacgattgcgaaacagattgcgctggcgctgcgtgatgaagtcgcggatctggaggcggcggggatcgggattattcagattgacgaaccggcgctgcgtgaaggtttaccgctgcgtcgcagcgactgggacgcctatctggaatggggtgtggaagccttccgcatcaacgcggcggtggcgaaggatgaaacccagatccacacccacatgtgttactgcgagttcaacgacattatggattcgatcgccgcgctggacgcggatgtgatcaccattgagacctcccgctcggatatggagttgctggagtcgttcgaagcgttcgactacccgaacgaaatcgggccgggcgtgtacgatattcactcgccgaacgtgccgagcgtcgagtggattgaagccctgctgaagaaggcggcacaacgtattccggcacaacgcctgtgggtgaatccggactgcggtctgaaaactcgcggttggccggaaacccgcgcggcgttagcgaacatggtcaaagcggcgcacaatctgcgtcaggcgaaataacccatcctggccgctgcgtttatccggcagcaatgcggcgctaccctttgacgggtagcgcccgtgcctgacctgattaacagcgcctctatctcctcttttttctcatttccctttttcttattttccgcgctgtctttttcaggatctggctatttggcgatcttgataataaaaaggttctccgtatgaatgacaaccaggcggatagcgtccccggaagcagagcggcggcttttattgcctcgcagatcgtttttcctgtcatgatcgcccagcgctctcatagcacaaaacgaggttttccattctgttatgttccctggcgacgataaacgtcgcattgtctcatggcgctggtgaaccttattttttaacggagatgtctgacatggcggtagcaggttgtcacgtaatggccaaacccggcggcgcgatctgcaatattgattgcacatattgcttctatcttgaaaaagaggcgctgtacccggaacgcaataaaaactggcggatgtcggacgagacgctggaacaatttatacgccagcatattgccgcgcagagtggcgaccgcattgactttgcctggcagggcggcgaaccgaccatgatggggctaccgtttttccgtcgggttgtcgcattatgtgaaaagtacggcgatgggcgaaaaatcactcatgcgttgcagacgaacggcatcctggtgaatgacgagtgggcgcgctttttcgctgaacagcattttctcatcggtctctctatcgacggcccggcgtcgttacacaaccactatcggtttaatcgcgctggaaaaggaactcatgaacaggtcgtcgcagccatggcgcggcttaaagcgcaccatgtcgactttaataccttaaccgtcgtgggaaaacataacgtcggtcatgcagcagacgtctacgaatttcttctggcggcgggatcgcgttttattcagtttatcccgctggtagagcgaatgagcaccgataactcatcggtacttaatctggtgatgcccggcgaaagcgcggcgacgctggcgccatggacggtaccgtcgtggcaatatggcgaatttctcaaccagatctttgatatctgggttcgtcgcgacgtagaccgcgtctatgtgcagatgtttgacgtggcgttagccgcctggacggcgcagcagccggtactgtgtgtacattccgagacttgtggacatgccttcgcgttggagtcgaacggcgatctctacaactgcgaccactttgtctacccggagcatctgctgggaaatatccaccagcacagcatcaaagccttaaataatagcgagcgggctattgcctttggcgaggccaagcgggagaccctgaccgccgattgtcgtcgctgtgactaccgctttgtatgtcatggcggctgtcctaagcatcgctttgccgtctcgccgtctggtcatcctgcgcataattacttgtgtgcgggctataagcattttttccagcacgttacgccgtatatgaatgtctggcgggagctgctggcgcaaggctatccgatggcatcgatcatgcgctggctggcgcaggacgcgcgtaaagacacaggagccgtcagtcgtaaccatccctgtccctgcggcagcggcaaaaaatataaaaaatgctgtggtaaagcatagctaacgtggcgatgacgctttgttgagcctacaccgactccggtctcgtaggcccaacaaacatcgtaatgcgctgtggttagccttttttcccaccgtactgcgcgaaccattccagcattctttgccagccgtctttcgctgaggcttcgtggtagcccggacgataatcggcattaaacgcgtgccctgcatcgggatagaccacgatttccgccttcgcattagcggcgcgtagcgcctgacgcatggtttccacgctctcctgtggaatactggtatcctgcccgccgtataaacccagtaccggcgcgttaagatcggtggcgatatcaacgggatgcttcggcgaattgagtgacgtgtcgcccaccagcttgccgtaccatgctaccgccgcttttaactgtgggttgtgcgcggcgtacagccaggtaatccggcctccccaacaaaaaccggtgatcatcagccgatgcgcatccccgccgttgcgcgaagcccaactggcgacgtgatccaggtcggcaaggacttgcgaatcgggtactttagccaccagcccgctcaataatgtgggtatatcggcgaaatcattggggtcgccttcgcggaaatagagctccggcgcgatagcgagatagccttccagcgccagtcgtcggcaaatatcgcgaatgtgttcatgtacgccaaaaatttcctgtaccacaatgaccaccggcagcgcgccgtcgctcgcttttggtctggcgtaataggcgggcatatcgtcgccctgagagggaatcgacgttatccccgcgctaatggccccatcaggcgtatgaatcatcgtaggggcaagtggggaggctgcaggtgcaaagccggatggatgtgtcgttgtcatggtattctccgtacccttaaaaaatagcgcaatcttaactatagacagtgtgtaacaaaccacattgccttaaagcggctatcttttgtgcaatgcctggcgatattgattatttattgtgatgaacatcactttttaatggtaagcgagtgcaattgttttacgtcatagtgatggctgtcacgaaaatatctttatgccttaggtaaagtgtctctttgcttcttctgacaaacccgattcacagaggagttttatatgtccaagtctgatgtttttcatctcggcctcaccaaaaacgatttacaaggggcccagctcgccatcgtccctggcgatcctgagcgtgtggaaaagatcgccgcgctgatggataagccggttaagctggcatctcaccgcgaattcacctcctggcgcgctgagctggatggcaaagcagttatcgtttgctctaccggtatcggtggcccgtctacctctattgccgtggaagaactggcgcaactgggtattcgtaccttcttgcgtatcggcaccacgggggctattcagccgcacattaacgtcggcgacgttctggtaacgaccgcatccgtacgtctggatggggcgagcctgcattttgcgccgatggaattcccggcggttgccgactttgcctgcaccactgcgctggttgaagccgcgaaatcgattggcgccacgactcacgttggcgtaaccgcctcttccgacactttctatccgggtcaggaacgttacgacacctattctggccgcgttgttcgtcgcttcaaaggctctatggaagagtggcaggcgatgggcgtgatgaactacgaaatggaatccgctacgctgttaaccatgtgcgcaagccagggtttacgcgcaggtatggtggcgggcgttatcgtcaaccgtacccaacaagagattccgaatgcggaaacgatgaaacaaactgaaagccacgcggtgaaaatcgtcgtggaagcggcccgtcgtctgctgtaattctcctctcttttgcaaaggccgacgcgttcggccttttctttttgcgtggcgcctcgcaggaaatcccttttaaactggacgtttatacagcacaattctattttgtgcaggacagtgtggttccaggagaggtgttgtggatattactcttatgataagcgccgtcgtggcgctggcggctggggcggtgattggctggctggcgacgaaagcgcacgccgatcaaatccgcgccgatcttatcgaagaacggcgtgagctggatatcgaacttagcgcggcccggcagcaattagcgcaagaagcgcactggcgcagtgaatgcgagttacttaataacgaactgcgtagcctgcacagtattaatacctctctggaagccgatctgcgtgaagtcacgacccgtctggaagcgactcagcaacacgcggaagacaaaatccgtcagatgatcaacagcgaacagcgtttaagcgagcagtttgaaaatctggcgaaccgtatctttgaacacagtaatcgtcgcgtagacgaacaaaaccgacaaagcctgaatagcctgctgacgccgctgcgtgagcaactggacggttttcgccgccaggttcaggagagttttggcaaagaagcgcaggagcggcatacgctggcgcacgaaattcgtaatttgcagcagcttaacgcgcaaatggcgcaggaagcgatcaacctgacgcgcgccctgaaaggggacaataaggcgcaaggaaactggggcgaagttgtgctggcgcgggtgctggaggcatccggactgcgtgaaggctacgaatacgaaacccaggtcagtattgagaacgatgcgcgctcgcggatgcagccggatgtcatcgtccgcttgccgcagggcaaagatgtggtcatcgacgctaaaatgacgttggtcgcctacgagcgttactttaacgctgaagatgactacacgcgcgaggccgctttacaagagcacatcgcctcggtgcgcaatcatattcgcttactggggcgtaaagactaccagcagcttcccggcctccgctcgctggactatgttctgatgtttatccccgtagaacccgctttcctgctggcgttagataaacagcccgaactgataaccgaggcgctgaaaaataacattatgctggtaagccccacgacgctgctggtggcgttacggacaatcgccaacctgtggcgctatgaacaccagagccgcaatgcgcagcacatcgcagacagagccagtaagctctacgataaaatgcggttgttcgttgatgatatgtcagcgatcggtcagagtctggataaagcgcaggataactaccgccaggcgatgaaaaaacttgcgtcggggcgtggcaacgttttggcgcaggcggaggccttccgggggctaggcgtggaaatcaaacgcgagattaatccggatttagcggaacaggccgttacgcaagatgaagaatatcgtttacgatcgatccctgaagggcggcaggatgaacattatcccaatgatgaacgggtgaagcagcagttaagttaacccatacggagtagtttagtcctggcgcagagtagggcaaattggcccaatctgttacacttcttgaacatttttatcgataagcaggcactgagatggtggaagattcacaagaaacgacgcactttggctttcagaccgtcgctaaagagcagaaagctgacatggtggcccacgtttttcattctgtggcgtcaaagtacgatgtgatgaatgacttaatgtcatttggcattcatcgtttgtggaagcgcttcaccattgattgcagtggcgtgcgtcgtggacaaaccgttctcgatttagcgggtggtacgggcgatcttaccgcgaaattttcacgtatggtcggggaaactggcaaagttatcctggcggatattaatgattccatgctcaaaatggggcgtgagaagctgcgtaatatcggcgtgatcggcaacgtagagtatgtgcaggcgaatgccgaagctctgcctttccctgataatacgtttgattgcattaccatttcgtttggtttgcgcaatgtaacggaaaaagaaaaagcgctgcggtcaatgttccgtgtgttgaaacccggcggacgtttactggtgcttgaattttccaagcctatcattgagccgctgagtaaagcgtatgacgcctattctttccatattttaccgcgtattggctcgatggtcgcaaacgatgcggatagctatcggtatctcgcggaatccatccgtatgcatcccgatcaggataccttaaaagccatgatgcaggacgccggatttgagagcgtggattattacaatctgacggcgggcgttgtggcattgcaccgtggttataaattctaggagggtggaatgccttttaaacccttagtgaccgcaggaattgaaggtctcctcaatacgtttctgtatcgttcgccagcgctgaaatcagccagaacgcgcttacagggaaaagtactgtgtgtgaaactaaagggattttcgatgccattagtcctggtattcagtgaacgccaggttgatgtgctgggggcatgggaaggcgaagcggactgtacggtaatcactcaagctagcgttttgccaaaactacgcgatcgtcagcagttggccacgcttattcgcagcggcgaactggaagtgcagggcgatattcaggtcgtgcaaaattttgtggcgctcgccgatctcgccgaattcgatcctgcggagctgttggcgccatacacgggtgatattgcggcggaaagtatcggtaaggtcgtgcgtggcggggctaaattcctgcgccacgggtttcaacgccagcagcgttatgccgctgaagcgatcactgaagagtggcgtatggcgcctggcccgctggaagtcgcatggtttgccgaagaaaccgcggctgttgagcgcgccgtagattctctgaccacacggctggaaaaactggaggccaaatgacgccaggtgaagtacggcgcctatatttcatcatccgcacgtttttaagctacggccttgatgaactcatcccccgaatgcgtcttacactgccactccgattatggcgctattcgctgttctggatgccaaaccggcataaagataaattgctgggtgaacgattaagactggcgttgcaagagctgggaccggtctggatcaaatttggtcagatgctctccacgcgccgtgacctgttcccgccgcaaatcgccgatcagctcgctttgctccaggataaagtcgcgccattcgatggtcggctggcgaaagcccagattgaagaggcgatgggggggctacctgtcgaagcctggtttgacgactttgatatccagcctttagcgtcggcgtcaatcgcccaggtacataccgcgcgattgaaatcaaacggtaaagaagtggttattaaggtcattcgcccggatattttgccggtaattcaggcagacctgaaactgatttatcgccttgctcgctgggtaccacgcctgttgccggatgggcgtcgtctgcgcccgacggaagtggtgcgtgagtatgagaaaacgctgatcgatgagctgaatctgctgcgggaatcggccaacgcgattcagttacgccgcaattttgaaaatagtcccatgctgtatatcccggaggtgtactccgattactgtagccagaacatgatggtgatggagcggatatacggcattcctgtttcggatgtggcggcgctggaaaagaacggcaccaacatgaaactgctggcggaacgcggggttaaagttttcttcacccaggttttccgcgacagctttttccatgcggacatgcatccgggaaatatttttgtcagccatgaacaccctgaaaacccgcaatatatcggcattgactgcggtatcgtcgggtcgctaaacaaagaagataagcgttatctggctgaaaactttatcgcgttttttaatcgcgattaccgaaaggtggcagaactgcatgtcgattcaggctgggttccgccagataccaacgttgaagattttgagtttgccatccgcaccgtctgtgaacctatctttgaaaagccgctcgcggaaatctcgtttggtcatgtgttgttaaaccttttcaatacagcgcgtcgatttaacatggaagtccagccgcaactggtgttgttgcagaaaacattattgtatgttgaaggggttgggcggcaactttatcctcagcttgatttgtggaaaacggcgaagccgtttcttgagtcctggatcaaagatcaggtgggtattccggctctcacgcgggctcttaaagaaaaagcgccgttctgggtcgaaaaaatgccagaaatacctgaactggtgtacgacagtttgcgccagggcaaatatttacagcacagtgttgataagattgcgcgcgagttacaggtaaaccatgtgcgccaaagtcagtctcgttatttattgggaattggcgcaacgctgttactgagcgggtcattcttactcgtcaaccgccctgaatggggattgatgcctggctggctcatggtcggcggcgtagttgtctggctggttggctggcgtaaaactcgttgagattttttatcgctcaacgccggttgtgtcacgcaggtacatattatcactcgaggcaatactcaggccgcaagtcaatgtcgtcccggtcgtatgtaaaagtatgtgaatagggcgggcgaaagcggctaacaaagaggcagcgtgaaggataatgtgtataatgcggccctaataattcatcatctatcacagaggaacatgtatgggtggtatcagtatttggcagttgttgattgttgccgttatcgtcgtactgctgttcggcaccaaaaaactcggttccatcggttccgatcttggcgcgtctatcaaaggctttaaaaaggccatgagcgatgatgatgccaaacaggataaaaccagtcaggacgctgattttaccgctaaatctatcgcggataagcaaggcgaagcgaaaaaggaagacgctaaaagccaagataaagagcaggtataatccgtgtttgatatcggttttagcgaactgctgttagtgttcgttatcggcctcattgtgttggggccgcaacgattgccagtagcggtaaaaacggtagcgggctggattcgcgcgttgcggtcccttgcgacaacggttcagaatgaactgactcaggaactgaaacttcaggagttccaggacagtctgaaaaaagtcgaaaaggcgagcctggaaaatctgactcccgaactgaaagcatctatggatgaactgcgtcaggcggcggagtcgatgaaacgcacctacagcgctaacgatcccgaacaagcgagcgatgaagcgcataccatccataatccggtggtaaaagggaacgaaacgcagcatgagggcgtcacccctgccgccgctgaaacacaggcgagcgcgccggaacaaaagccggagcccgttaaagctaacgtgcctgagtcgacggaaaccgcttccgtagccacgatagacgccgagaagaaatccgctgcgcctgttgtcgaatcttccccctcgtcgagtgataaaccgtaaacatggctgtagaagatactcaaccgcttatcacgcatctgatcgagttgcgtaagcgcctgctaaactgcatcgtcgcagtacttctgatttttctggcgttaatttatttcgccaatgatatttatcatttagtcgccgcaccgctgattaaacagatgccgcaaggggcgacaatgattgcgacggatgtggcgtcgccgttttttacgcctatcaaactcaccttcatggtgtctttgatcttatccgcgcctgtcattttgtaccaggtttgggcctttatcgccccggcgctgtataagcatgagcgtcgtctggtcgtacctctgctggtatccagctcgctgcttttctatattggtatggccttcgcctattttgtcgtattccctttggcctttggtttcctgacgcatacggcgccggaaggggtacaggtttcgacagatatcgccagctatcttagctttgtcatggcgctttttatggcctttggcgtagcctttgaagtgccggtggcgattgtgttgctgtgctggatgggcatcaccacgccagaagatttgcgtaaaaaacggccttatatcctggtcggggcattcattgtgggaatgctgcttacgccgccagatgttttctcgcaaacgttgctggcgataccgatgtactgcctgtttgaaattggcgttttctgctcacgcttttatgtcggtaagcgacggacgcgcgacgaagataacgaggccgaaaccgaaaaggccgagcacactgaagactaaacacaaccgcccgccagggcggttgtcatatgggggcaagcatgtttgatattggcgttaatttaaccagtagccagtttgcaaaagatcgtgatgatgtggtcgcccgtgcgtttgcggcgggagtaaaaggtatgctactgaccggaacgaacatccatgaaagtcagcaggcgttaaaactggcgcggcgctacccccattgttggtcgacggctggcgtccatccccatgacagcagtcagtggtcacccgcgtctgaagacgccattattgcgctggcgaaccagccggaagtcgtcgctatcggtgagtgcgggctggatttcaatcgcaatttttccacgccgcaggagcaggagcgtgcctttcaggcgcagctacaaattgccgccgaattgcagataccaatctttatgcactgccgggacgcgcatgagcgatttctggtattgcttgatccctggctggatagtcttcctggtgcaatactgcactgctttaccggttcacgccagcaaatgcaggcctgtgtggatagagggctctatatcggtattaccgggtgggtttgcgacgaacgacgcgggcttgagctacgtgaactcttaccgtttattccagcggaaaagctactgatagaaaccgacgcgccgtatctgttgcctcgcgatcttacgccgaaaccaacgtcacgacgcaacgagcccgcgtatctgcctcacatcctggagcgcatagcgctatggcgtggtgaagatccgcaatggttagcggcgatgacagatgccaacgccagaaccttatttgaggttgtattctgaacgatcgctaaatcttgcgaaaaccggtgttttttacgctctgcttcacttctttattgagtaaattaagcagtaacatcgaacgcgtttcgccatccggttcggtaaaaatcgctttcagcccttcaaatgcgccttccgtgatgatgacgctatcgccgggatagggggtttcaggatcgacaacgccttcgggcttgtagatagaaagctgatgaataacgctggaaggcacgatcgcaggatgcgcgccaaagcgcacaaaatggctgacgccgcgcgtggcgttgattgtagtggtatgtatcacttccggatcaaattcaacgaacagataattaggaaagagcggttcgctgacggaggtacgttttccgcgtaccattttttccagggtgatcatcggtgtcaggcaacttaccgcttgtctttcgaggtgttcctgagcacgctgaagttgcccgcgtttgcagtacagtaaataccaggattgcataatgactcttatccgcttgttcggggcgcaagcatagcaaaagccatgcgcgaagttaattatacacttcatcctttaagccgtatctggattagcgttggttgccagagttcacgctaatttaacaaaaatacagcatcccgatgatgaacgccgtataatgatgcgcttaccaagaggctacaatggacgccatgaaatatcacgatttacgcgacttcctgacgctacttgagcagcagggggaactaaaacgcatcacgctacctgtggatcctcatctggaaatcacggaaatcgctgaccgcacgctgcgtgccggtggaccggcgttgctgtttgaaaatcctaaaggttacgccatgccggtgctgtgcaacctttttggcacgccaaaacgcgtggcgatgggcatggggcaggatgatgtttccgccttacgggaagtgggtaaattattagcgtttcttaaagaacctgagccgccgaaaggctttcgcgatctgtttgacaagctgccgcagtttaagcaagtgctgaatatgccgacgaaacggttacgcggcgcgccttgccagcagaaaatcgcgtctggcgatgatgtcgatttaacgcgtcttcctgtcatgacctgttggccggacgacgccgcgccgctgattacctggggactgacggtaacgcgtggtccgcacaaagagcggcaaaacctgggcatttatcgtcagcagttgataggtaaaaataagctgattatgcgctggctgtctcaccgcggcggcgcgctggattttcaggagtggttagccgcgcgtccgggtgaacgtttcccggtctccgtcgcattgggcgccgatccggcgacgatacttggcgccgtgactcctgttcccgatactctgtcggagtatgcctttgcgggcctgctgcgcggcacgaaaactgaagtggttaaatgcctttctaacgatctggaagtgcctgccagcgccgagattatccttgaaggttacattgagccgggagagatggcgccggaaggaccgtatggcgatcatacgggctattataatgaagtggatagctttccggtctttaccgtcacgcatattacacagcgtgaggatgccatctatcactccacctataccgggcgtccgcccgatgagcctgcggtattaggggtggcgctcaatgaagtcttcgtgcctattctgcaaaaacagtttccggaaatcgtcgacttttatctgccgccggaagggtgttcttaccgcctggcggtagtgacgatgaaaaagcagtacgctggtcatgcgaaacgcgtcatgatgggcgtctggtcgtttttgcgccagtttatgtatacgaaatttgttatcgtttgcgatgatgacgttaacgcacgcgactggaatgatgtgatctgggcgattaccacccgtatggaccctgcacgggatacggtgctggttgaaaatacgccgattgattacctggattttgcctcgccggtctccgggctgggttcaaaaatggggctggatgccacaaacaaatggccgggcgaaacccaacgcgagtggggtcgtcctattgttaaagatcctgaagttaccgcgcgtattgatgcgatttgggatgagctggctatctttaaataactgaaagcggacatcgacatttcaggctgcggcgactcagcttgaaaaatgtcggtattgacccgacacccgacagagggagcgcatgacaaccttaagctgtaaagtgacctcggtagaagctatcaccgataccgtatatcgggttcgtttagtgccggacgcggcgttttcattccgcgctggtcagtatttgatggtcgtaatggacgagcgtgacaaacgcccgttttcgatggcttcaacgccggacgagaaagggtttattgaattacacattggcgcctccgagctcaatctgtatgcgatggcggtcatggatcggattctgaaagaccgggaaatcgtcgtcgatattccgcatggcgacgcctggctacgtgacgatgaagagcgtccgttgattctgatcgcgggcggtacgggcttttcttatgtgcgctccatcctgttgacggcgttagcgcgcaacccggcccgcgatgttaccatttactggggcggccgcgaagaaaagcacctctatgatctctctgagctggaagcactctctgttaaccatccgaatttgcgtattgaacctgttgtcgagcagccggaagaaggctggcgtggacgtacaggaacggtacttacggcggtattgcaggattatggtacgctggcggggcacgatatttatattgccggacgttttgagatggcgaaaatcgcccgcgatctgttctgtcatgagcgtaacgcgcgggaagatcgtctgtttggcgatgcgttcgcatttatttaactattttatgggacgcagtagcgtccctttttacgttagcctacctaaaagtcctcttaaatattaattaatcgtcaactataaaaccttatgatattgaatatctacaggctttgtattgcgtgtaataaattaagtaatattatgtcctgaggctatcaataaaaatagttaattatatatgcttcatttatttttataaaagaaacataaaatggaaagttagttatttatttataagatggagagtgttatgaaatttaaatatgctttaacttctctcgcattatctgttgcaattttgtcatcagtaccttctactgctttcgccatcggcggcgccagcggcgctaaagtggactatcaggtccagggaaaaattggcgaagttgttatgaacccctatgatatcgcgccgctaaccgccgttattcgtaatggcggttaccagttacgtgacgtgcatgtacggattgtacccaaagaaaatggccaggagatcgcgtataaagttaataataaataccttttaacgtatggcggtattcccgtctttggtctttacccggattatgtcaataccgttgaagttgaatatacaagtatccagggtagtaaaaccgaaaatgtaaaagaaagctataaaatgtatgcaccgcctgcctatattgaatcagcgggtacaaaagaagaacaatcagcactctttactatcgatgttaaaaaggtttccccagaatttaaagatcgcttgtatcttttgaataatacgaaagataagtctgggaatggaacgcgtactgtctggaacaaccctactgggggtgcattagaatggaacttcactacagctaacgctattatcgacacctccggtgatattcgttggtttatgaatccaagttcaatttatgatttaaagtcaatttatcgtgctggcgttatgatgggctttaaacaaaaccaggatggcgcactatcgtggggctacggtcagcgttatgtgaaatacgatatcatggggcgtgaaatctttaaccgccgcctgccggataattataacgatttttcacactcaatggataacgcggccaacggtcactacttcctgcgtgtagccagctctaactataaacgccctgatgggaaaaatgttcgtaccgtgcgtgatgtgattgccgaagttgatcagaacggcgtggtagtggatgaatggcgtctgtttgatatcctcgatccttatcgtgatgtgataatgaaaaccctcgatcagggcgctgtgtgcctgaatatcgacgccagccagtccggccatacgttgagcgaagaagatctggcggcgctggactcctccgacaaattcggggatatcgtgggtagtggggctggccgcaactgggcgcatgtcaacagcgtcgactatgacagtgaagatgattccatcatcatcagctcccgccaccagagtgcgattatcaaaatcggccgcgataagaaagtgaagtggatactgggtacgcctgctggctggaaagcgccatttaatgccgcaattctgacgcctgtggatagcaaaggccaaaaaatcgcctgccaggacagtggctgcgagggtgacttcgactggacatggacgcaacatacggcctttaaaattgatagtaagagtaaaggcgatatcttatacctttccgctttcgacaatggcgatggccgcggcttagaacagcctgctatgcagagtatgaaatacagccgctccgtgatttacaaaatcgaccagaaaaacaagacagtccaacagatctggcaatacggtaaagagcgcgggaacgagtggtttagcccggtaacctctatcaccgagtaccagactgacaagaattctgtgttcgtgtattccgcaacagcaggtggtgcgtttgatttatcggtaggcgcatttaccagcttgcctaatccgtatctggaagagttcaaatggggagaaaaagagcctgcggttgaaatgcaaatacatggtgcgcgtggatatcaggctatgccatttagcctgaccaaagcgcttactgagtagagcaggccatacggtgaaaaaacccgcccctgacgggcgggaaaaacggcaactaaactgtttcccgtcataattcgcgcagcctctttgttggctgcctttgctcaccccgggcacatagttatctatgtgcccggggattcgctcagttgccgctgcgctgcaatgcgagttatttaggggatattatctttgattaaacccgctcaaacaccgtggcgatgccctgacccagaccaatacacatcgtcgccagaccaaactgcgcgtctttgcgctccatcaggttgataagcgtggtgctgatacgtgctccggagcagccgagcggatgaccaagcgcgatcgcaccgccgttgaggttgatcttctcgtctatctgctccatcaatcccagatccttaatgcatggcaggatctgtgcggcaaacgcttcgttcatctcaaacacatcgatatcgctggctgacagtcccgcttttttcaacgccagttttgacgccggaaccggcccgtaacccataattgacggatcacaacccaccactgccattgagcgaatacgggcgcgaggtttcagacccagctcacgggcacgactttcgctcattaccagcatggcggctgcgccatcggaaagcgcggatgaggtgcccgccgtgaccgtgccactaaccggatcaaatgccggacgcagcgttgatagcgcttcgaccgtggtttccgggcggatcacttcatcgtagttaaactgcttcaacacgccgtctgcatcatgaccgccagtcgggataatctccgttttgaatgcgccagactgggtggcggcccaggcgcgagcgtgagaacgcgcggcgaactggtcctgcatttcccggctaatgccgtgcaggcgggagagcatttccgccgttagccccatcatccctgccgctttggcgacgttgcgactcagacccgggtgaaaatccacgccgtggctcatcggcacgtgccccatatgctccacgccgccaaccagacaaacctgcgcatcgccggtcatgatcattcgcgctgcatcgtgtaacgcctgcatcgaggaaccacacagacggttgacggtgaccgccggtaccgaatggggaatttctgccagcagcgcggcgttacgggcaatgttgaagccttgctccagcgtttgttgtacgcagccccagtaaatatcatcgagggtcgccgctgtaagcgacggattacgcgccagcaggctacgcattaagtgggcggagagatcttctgctcgcacgttgcgaaacgcgccgcccttcgaacggcccatcggggtgcgaatagcatcgacaatgacaacctgttccattgtgactccttaagccgttttcagagaaccaaccggacgggctggttcaaccgggggataatacggttcgttatggcgcgctttattacgcagcccttccggcacctcatacagcgggccgaggtgttgatactgctgcgccatatcaagatatttcgcgctgccctgtgtatccagccagcggaatgcgccgccgtggaacggagggaagcccaggccgtagaccagcgccatatcggcttccgccgggcttgcgataatgccttcttccagacagcgaaccacttcgttaatcatcgggatcatcatacgggcgattatctcgtcgtcgctgaagtcgcgtttcggctggctgacgcttgccagcaggtcatccaccgcggcatcttcttctttcttcggcttacccttgctgtcttctttatagcgccagaagcccagaccgtttttttgcccaaaacggctggcgtcaaacaatgcgtcgatcgcgtcgcggtaatctttctgcatacgctgtgggaagcctgccgccattactgcctgcgcgtggtgggcggtatcaatacccaccacgtcgagcagataggccgggcccatcggccagccgaactgtttttccatcactttatcgactttgcggaaatccgcgccgtcgcgcagcagttgactgaaaccggcgaaataggggaacagcacgcggttaacaaagaagccggggcagtcgttgactacaatcggtgtcttgcccattttgctggcccaggcgacgactttggcaatggtttcgtctgaactcttctcgccgcgaatgatttcaaccagcggcatccggtgtaccgggttgaagaagtgcattccgcaaaagttttccggacgttccagggcgcttgccagttcgccaattgggatggtggaggtatttgaggccagcacggtttccgggcgcactttctgctcggtttccgccagtaccgcttttttgactttcggattttcgactaccgcttcgacaacaacatctacgcgatcgaaaccggcataatcgagagtcgggtggatggtcgaaatgacgcccgccagcttcagaccgtcgatcttgccgcgctccagctgtttgttcagcagcttggccgcttcggtcatgccgaggttcaacgatttatcgttgatatctttcatgatgaccggtacgcctttccaggccgactggtaagcgataccgccgcccataatgcccgcgcccagtacggctgcctgtttcggcgtctcaatatctttggtcagctttttggctttaccttttacatattgatcgttgaggaagataccgaccagcgcacgagcctcattggtatgcgccagcggaacaaagcttttattttccagattcagcgcttcttcacgaccaaaacgcgcggcggcttcaatggttttcactgcggtcatcggcgccggataatgtttacccgccgtttgtgcgaccatgcctttagcgatggtaaagctcatcgctgcttcaatcttactgagtttcaacggttccagtttcggctggcgtttagctctccagtcgagatcgccggtaatggcctggcgtaacaccgctatcgcgccttcaattagcttctcttgtttgaccacgccgtccacaaggccgattttcagcgcgtgctcagcaccgacatctttacctgccgcgataatctccagcgcgctgtctgcgcccagcatacgcggcagacgaacggagccgccgaaacccggcatgatgcccagtttagtttccggcagaccgatacggaggtctggcgtcgccagacggtaatcggtggccagcacgcattcgcacccgccgcccagcgcatagccgtttacggcggcaagggtcggtacgggtaaatcttccagacggttaaagacgctattagcgaaatgcagccattggcttaactgctcttcggggacgaggaacagtgaaagaaattcggtgatgtccgcgccgacaataaaggccgctttattagagcgcagcagcagcccttttaaatcgtgttgcttttccagcacctcaagcgcctggccgaggctggcgacggttgcggtgtcgagtttattgaccgagcctggagcatcgaacaccagttcggcgatgccatcttccagccagtcgaggtacagggtgtcgcctttataaagcatgtcagtctcctgaatccacaaagtgatctggtcgtaccagatgaagcgaagtgtgtattttgtgttaaaaaaatgcaaataaatgattaaagaaatgccgatgtgatcacgctcggcagagatcacgctctcgtggggcgatgtgctaagatgcgggaacttgaggtcaaaaaaacagaagggtaaaaaatggaatcactggccgcgctctataaaaatcatattgttaccttacaagaacggacgcgcgatgttctggcgcgctttaagctggatgcgttacttattcattctggcgagcttttcaacgtctttctcgacgatcacccttatccgtttaaggtcaatccacagtttaaagcgtgggtgccggtaactcaggttccaaattgctggctgttggtcgatggcgtcaacaaacccaaattgtggttttatctgccggtcgattactggcataacgttgaaccgctgccaacgtccttctggacagaagaagtcgaggtcgtcgccttaccgaaagcggatggcatcggcagccaactgcctgccgcgcgtggcaatatcggctatatcggcccggttcctgagcgcgcgctacaattggatatcgccgccagcaacatcaacccgaaaggtgttatcgactatctgcattactaccgcgcctataaaacggattatgaactggcctgtatgcgcgaagcgcagaaaatggcggtgagcggtcatcgggcggcggaagaggccttccgttccggcatgagcgagttcgacatcaacctggcgtacctgaccgccacgggacatcgcgataccgatgttccatacagcaacattgtggcgctgaacgaacatgccgccgtgctgcattacacgaaactggatcatcaggcaccgtctgaaatgcgcagtttcctgctggatgcgggcgcggaatacaacggctacgcggcggatctgacgcggacctggtcggcgaaaagcgataacgactacgcccacctggtgaaagatgttaacgacgaacagttggcgctgatcgctaccatgaaggcgggcgtcagctatgtggattatcatattcaattccatcagcgcatcgcgaagctgctgcgtaaacatcaaatcattaccgacatgagtgaagaggcgatggtggaaaatgatctcaccgggccgtttatgccgcacggtattggtcatccgttgggtctgcaggtacacgatgtggccgggtttatgcaggatgattccggtacgcatctcgccgcgccgtccaaatacccgtatctgcgctgcacgcgtgtgttacagccgcgaatggtgttgaccatcgaaccggggatttacttcatcgaatcgctgttagcgccatggcgcgaaggcccgttcagcaagcacttcaactggcagaaaattgaagcgctcaagcctttcggcggtattcgcattgaagataacgtggtcatccacgaaaacggcgtggaaaacatgacgcgggatttaaaactggcgtaatggacagttggttaatccctgcagcgccggtcaccgttgttgaagagatcaaaaaaagccgctttattacgctattggcgcataccgatggcgtagacgcggcgaaagcgtttgttgagtcagtcagagctgagcatcctgatgcgcgccaccattgtgtggcgtgggtggcgggtgcgccggacgactcacagcaactgggcttttcagacgacggcgaaccggcgggaacggcaggcaagccgatgcttgcgcaattgatgggcagcggcgtcggagaaattactgccgtcgtcgtgcgctactatagtggtattctgctgggtacgggcgggctggtaaaagcctatggcggcggtgtgaatcaggcattacgtcagcttgccacacaacgcaagacgccattaaccgaatatactttgcagtgtgagtacggtcagttggccggaatcgaagcattattaggacagtttgccgggaagatcgtttccagcgattatcaggcgtctgttcggctcagggtggcgcttccttttgctcatgtgaatgcattttccacaaaactggcggattttagccgtggttcattgcaattgttagcgattgaagaataatccccacctcatttttaagaataaaggaagcggcagagatgcattttcgcgccattacccgaatcgttggactactggttatcttattttcggggacaatgattctcccgggactggtagcgctaatatatcgtgatggcgcaggaagagcgttcacgcagaccttttttgtcgcgctggcgatcggttccatactgtggtggccgaaccgtagggaaaagggcgagctgaaatcccgcgaaggatttcttatcgtggtgctgttctggaccgtgctgggcagcgtgggtgcgctgccgtttattttctcggaaagcccaaacctcaccattaccgatgctttttttgaatcgttctccgggttaaccaccacgggcgccactactctggtggggctggattcattaccgcacgccattctcttttatcgtcagatgctgcaatggtttggcggtatggggatcattgtgctggcggtggcgattctccctatcctcggcgtcggggggatgcagctctatcgggcggaaatgccggggccgctcaaagataacaaaatgcgcccgcgtattgccgagacggcgaaaacgctgtggcttatctatgtcttgctaacggtagcctgcgcgctggcgctatggtttgcagggatgcccgcgtttgacgctatcggacacagcttctccactatcgctatcggcggcttctcaacgcatgacgccagcgtaggctattttgatagtcccactattaataccatcatcgctattttcctgctgatctccggttgtaactatggcctgcatttctctttattaagcgggcgtagcctgaaagtatactggcgcgatccggaattccgcatgttcatcggcgtacagttgacgctggtggtgatctgcacgctggtactgtggttccataatatctacgactcggcgctgacaacgctaaatcaggcgttcttccaggtcgtgtcgatggcgacaacggcagggtttaccacggacagcattgcgcgctggccgctgtttttgcccgtcttgctgctatgttccgcgtttattggcggttgcgccgggtcaacgggcggggggttaaaggtcatccgtattctgttgttgtttaaacaggggaaccgcgaactcaaacgtctggtgcatccgaatgccgtttacagtattaagctggggaaccgggcactgccagaacgtattctggaagccgtctggggattcttttctgcctacgcgctggtatttatcgtcagtatgctggccattatcgctacaggcgtagatgatttctcggctttcgcctcggtagtggctacgcttaataacctgggaccggggctgggggtggttgctgataacttcgccagtatgaatccggttgcgaaatggatactaatcgccaacatgctatttggtcgtttggaagtattcactttgctggtactttttaccccgactttctggcgtgaataatggagtaacacgtgaaaacattgattcttttctctacccgggacggacaaacgcgcgaaattgcctcttatctggcttctgaactcaaagatatggggatctgggccgatgtcgttaatctgcatcgcgcagaagagcctgactgggatagctatgatcgcgtagtgattggcgcgtctattcgttatggtcattaccacagcgcctttcaggagtttgttaagaaatatgccacgcggttgaacggaatgccgagcgccttttattccgttaacctggtggcgcgtaaagctgaaaaacggacgccgcagactaacagctacgcgcggaagtttttaatgagctctccgtggcgacctgactactgtgccgtcattgcaggcgcgcttcgctatccccgttatcgctggtatgaccgtctgatgatcaagcttattatgaagatgtcgggcggcgaaacggataccagtaaagaagtggtgtacaccgactgggagcaggttgcgcactttgcccgtgaaatagcccatttaaccaacaaatcgtcggcaaaataaacgcaaagaataaaaagtgcgcactcagaaaattattttaaatttcctcttgtcaggcaaaaataactccctataatgcgccaccactgacacggaacaacggcacacaggccgccgggtcagcggggttcggaccagaacctcacggagaaaagcgaaaataaacgcttgactctgaagcgggaaagcgtaatatgcacaccccgcgccgctgagaaaaagcgaagcggcactgctctttaacaatttatcagacaatctgtgtgggcactcgaagatacggattcttgacgtcgcaagacgaaaaatgaataccaagtctcaagagtgaacacgtaattcattacgaagtttaattcattgagcatcaaacttttaaattgaagagtttgatcatggctcagattgaacgctggcggcaggcctaacacatgcaagtcgaacggtaacaggaagcagcttgctgcttcgctgacgagtggcggacgggtgagtaatgtctgggaaactgcctgatggagggggataactactggaaacggtggctaataccgcataacgtcgcaagaccaaagagggggaccttcgggcctcttgccatcagatgtgcccagatgggattagcttgttggtgaggtaacggctcaccaaggcgacgatccctagctggtctgagaggatgaccagccacactggaactgagacacggtccagactcctacgggaggcagcagtggggaatattgcacaatgggcgcaagcctgatgcagccatgccgcgtgtatgaagaaggccttcgggttgtaaagtactttcagcggggaggaaggtgttgtggttaataaccgcagcaattgacgttacccgcagaagaagcaccggctaactccgtgccagcagccgcggtaatacggagggtgcaagcgttaatcggaattactgggcgtaaagcgcacgcaggcggtctgtcaagtcggatgtgaaatccccgggctcaacctgggaactgcattcgaaactggcaggcttgagtcttgtagaggggggtagaattccaggtgtagcggtgaaatgcgtagagatctggaggaataccggtggcgaaggcggccccctggacaaagactgacgctcaggtgcgaaagcgtggggagcaaacaggattagataccctggtagtccacgccgtaaacgatgtctacttggaggttgtgcccttgaggcgtggcttccggagctaacgcgttaagtagaccgcctggggagtacggccgcaaggttaaaactcaaatgaattgacgggggcccgcacaagcggtggagcatgtggtttaattcgatgcaacgcgaagaaccttacctggtcttgacatccacagaactttccagagatggattggtgccttcgggaactgtgagacaggtgctgcatggctgtcgtcagctcgtgttgtgaaatgttgggttaagtcccgcaacgagcgcaacccttatcctttgttgccagcgattaggtcgggaactcaaaggagactgccagtgataaactggaggaaggtggggatgacgtcaagtcatcatggcccttacgaccagggctacacacgtgctacaatggcgcatacaaagagaagcgacctcgcgagagcaagcggacctcataaagtgcgtcgtagtccggattggagtctgcaactcgactccatgaagtcggaatcgctagtaatcgtggatcagaatgccacggtgaatacgttcccgggccttgtacacaccgcccgtcacaccatgggagtgggttgcaaaagaagtaggtagcttaaccttcgggagggcgcttaccactttgtgattcatgactggggtgaagtcgtaacaaggtaaccgtaggggaacctgcggttggatcacctccttaccttaaagaaacggtctttgaagtgctcacacagattgtctgatgaaaaacgagcagtaaaacctctacaggcttgtagctcaggtggttagagcgcacccctgataagggtgaggtcggtggttcaagtccactcaggcctaccaaattttccctgaatactgcgttgtgaaataactcacatactgatgtatgcttcgttattccacgccttgtctcaggaaaaattatcggtaaagaggttctgactacacgatggggctatagctcagctgggagagcgcctgctttgcacgcaggaggtctgcggttcgatcccgcatagctccaccatctcgtgagtgtttacgaaaaaatacttcagagtgtacctgaaagggttcactgcgaagttttgctctttaaaaatctggatcaagctgaaaattgaaacacagaacaacgaaagttgttcgtgagtctctcaaattttcgcgacacgagaatgttttacgaaacatcttcgggttgtgaggttaagcgactaagcgtacacggtggatgccctggcagtcagaggcgatgaaggacgtgctaatctgcgataagcgccggtaaggtgatatgaaccgttataaccggcgatttccgaatggggaaacccagtgtgattcgtcacactatcattaactgaatccataggttaatgaggcgaaccgggggaactgaaacatctaagtaccccgaggaaaagaaatcaaccgagattcccccagtagcggcgagcgaacggggaggagcccagagcctgaatcagcatgtgtgttagtggaagcgtctggaaaggcgcgcgatacagggtgacagccccgtacacaaaagcgcatgtgctgtgagctcgatgagtagggcgggacacgtggtatcctgtctgaatatggggggaccatcctccaaggctaaatactcctgactgaccgatagtgaaccagtaccgtgagggaaaggcgaaaagaaccccggcgaggggagtgaaaaagaacctgaaaccgtgtacgtacaagcagtgggagcacccttcggggtgtgactgcgtaccttttgtataatgggtcagcgacttatattctgtagcaaggttaaccgtataggggagccggagggaaaccgagtcttaattgggcgttaagttgcagggtatagacccgaaacccggtgatctagccatgggcaggttgaaggttgggtaacactaactggaggaccgaaccgactaatgttgaaaaattagcggatgacctgtggctgggggtgaaaggccaatcaaaccgggagatagctggttctccccgaaagctatttaggtagcgcctcgtgaattcatctccgggggtagagcactgtttcggctagggggccatcccggcttaccaacccgatgcaaactgcgaataccggagaatgttatcacgggagacacacggcgggtgctaacgtccgtcgtgaagagggaaacaacccagaccgccagctaaggtcccaaagtcatggttaagtgggaaacgatgtgggaaggcccagacagccaggatgttggcttagaagcagccatcatttaaagaaagcgtaatagctcactggtcgagtcggcctgcgcggaagatgtaacggggctaaaccatgcaccgaagctgcggcagcgaacgtatcacccaagacaactttacggagttggcgattgacggagcgaagcgacgtcaaagcgttcattaaagtcgagttggcttagggatacgttcgttgggtaggggagcgttctgtaagcctgtgaaggtgtgtcgtgaggcatgctggaggtatcagaagtgcgaatgctgacataagtaacgataaagcgggtgaaaagcccgctcgccggaagaccaagggttcctgtccaacgttaatcggggcagggtgagtcgacccctaaggcgaggccgaaaggcgtagtcgatgggaaacgggttaatattcccgtacttggtgttactgcgaaggggggacggagaaggctatgttggccgggcgacggttgtcccggtttaagcgtgtaggtgtgtgttccaggtaaatccggttcactttaacactgaggcgtgacgacgaggcactacggtgctgaagcaacaaatgccctgcttccaggaaaagcctctaagcatcaggtaacacgaaatcgtaccccaaaccgacacaggtggtcaggtagagaataccaaggcgcttgagagaactcgggtgaaggaactaggcaaaatggtgccgtaacttcgggagaaggcacgctgacacgtaggtgaagtgatttactcatggagctgaagtcagtcgaagataccagctggctgcaactgtttattaaaaacacagcactgtgcaaacacgaaagtggacgtatacggtgtgacgcctgcccggtgccggaaggttaattgatggggtcagcgtaagcgaagctcctgatcgaagccccggtaaacggcggccgtaactataacggtcctaaggtagcgaaattccttgtcgggtaagttccgacctgcacgaatggcgtaatgatggccaggctgtctccacccgagactcagtgaaattgaactcgctgtgaagatgcagtgtacccgcggcaagacggaaagaccccgtgaacctttactatagcttgacactgaacattgagccttgatgtgtaggataggtgggaggctttgaagtgtggacgccagtctgcatggagccgaccttgaaataccaccctttaatgtttgatgttctaacgtggacccgtaatccgggttgcggacagtgtctggtgggtagtttgactggggcggtctcctcctaaagagtaacggaggagcacgaaggttggctaatcctggtcggacatcaggaggttagtgcaatggcataagccagcttgactgcgagcgtgacggcgcgagcaggtgcgaaagcaggtcatagtgatccggtggttctgaatggaagggccatcgctcaacggataaaaggtactccggggataacaggctgataccgcccaagagttcatatcgacggcggtgtttggcacctcgatgtcggctcatcacatcctggggctgaagtaggtcccaagggtatggctgttcgccatttaaagtggtacgcgagctgggtttagaacgtcgtgagacagttcggtccctatctgccgtgggcgctggagaactgaggggggctgctcctagtacgagaggaccggagtggacgcatcactggtgttcgggttgtcatgccaatggcactgcccggtagctaaatgcggaagagataagtgctgaaagcatctaagcacgaaacttgccccgagatgagttctccctgagacttagagtctcctgaaggaacgttgaagacgacgacgttgataggccgggtgtgtaagcgcagcgatgcgttgagctaaccggtactaatgaaccgtgaggcttaaccttacaacgccgaagatgttttggcggttgagagacgattttcagcactgattcagattacatcagaacgtaaaaacggtctgataacagaatttgcctggcggcactagcgcggtggtcccacctgaccccatgccgaactcagaagtgaaacgccgtagcgccgatggtagtgtggggtctccccatgcgagagtagggaactgccaggcatcaaataaaacgaagggccctgtcggaagacagggccttttgttttatctgtggtctgtcggtgagcactcgttgcgcagcaacggcccggagggtggcgggcaggacgcccgccataaactgccaggcattagtttagtgaagaagcccatcctgacggacgggcttttttgcgtgtgcggtaactgtaaaaccgtaggcctgataagcgcagcgccatcaggcaaccggcactgccggatggcggctccgccttatccggcctacaaggaacgtgctttctctaaccaccgcaaaatgaaggcagaaatctgcgatacatcattaagatccaaaacgggtaccgctacggcaagtggaatatcactggcaaccgcaataacatgctcatcaagaattaattcttcctcgctgtgcccacatccctgacgaaaaagtaagatcttcgcaactgcctcgtgtttaaacccttctaccagcaccatatctagctttgatgcatccatccggctcaccagccatgccagatccaactcttcttgccccggcgtttcagtcattaacgcccagcgctgctgactggcaaccagcgtctgtgccgccccggctttacgtaattcgtagctatctttacccggtttatcaacatccatatcatgatgggtatgcttaatcagccctggccgaataccgtgcgcacaaagtgctgggatcagttttttcagcagtgttgtttttcccgtgccgctccacgcggcaatggcgagtagcggtatcatggtctcttttgccattgcgcgagttcctccggcgtgttgacgttcacaaatgcctccttacaatcgctgaaatcaacggcgtgtccgcctacctggcgcataaaaatcattacccgccgctcgcctgcttgcaaataagctgtcaactggggctcaacggcacgattaatcaacgcgatcgttggatgatcgcgctctccatcatgaacccaaaccacgggtgcaccatgacgctgcgctgctaaacgatcgaccaggttgtgggggatacagggattgtcacagggacaaaacagaaaccagtcgcctgctacctgctgaaaaacggaaagcatacccgccagcggaccgggaaagtcagcaattgaatccggaatgactttcaggccgctggcctggtagatatccagatggcgattagcactaatgacgaccgtagcaagttgtggcgcgagcgcgtcggcaacgtgtcgccagagcggtttcccgcccagttcaagcagacctttatccgcacctcccatccgcctggctttaccgcctgccagcaccacgccggttattacttcatccagattcaccgatatcgcctcttttattgtgggattgaccctgctaccgtgtctgtatcaagaataaggagcacagctatgaaatgtaaacgcctgaatgaagtcattgaactcctccagccagcctggcagaaagagcctgatcttaatctgacgcaatttttgcagaaactggcgaaagagtcaggttttgacggcaaactggaagatttaactgatgatatcctgatctaccatctgaaaatgcgcgattccgccaaagacgccgccattccagggattcaaaaagactatgaagaggactttaaaacggcgcttttacgcgcccgcggcgttattaaagagtaaaaccttgtaagcggcgccaccgaaatcgccacgaaatgatatcctgaatcattcgtagtattttccggatgatgggatgaacgacaacgcttttactttccagacgctacacccggaaaccatcatggatgcgctgtttgaacaggggatcatggtggattccgggctaactccactaaacagttatgaaaaccgcgtctatcagtttcaggatgaagaccgtcgacgttttgtcgttaagttttatcgtcctgaacgctggtctgttgatcaaattcgggaagaacatcaattcgcgcttgaactggtgaaggatgaggttccggttgctgctccgctcgcgtttaatggccagacgctgttagcgcatcagggctatcattatgccattttccccagcgtaggcggtcgtcagtttgaagcagacaatatcgatcagatggaggcggtagggcgttatcttggccgattgcatcagacggggcgaaaacgtcctttcactttccggcctgacattgggcttgcggagtatctttttgaacctcgccaggtattcgaagatgccgcactgattccctccgggcaaaaagcggctttcctgaaagccactgatactctactgtctgcagttaccgaatgctggcgcaccgatttcgccacgctgcgattgcacggcgattgtcatgccggcaacattctatggcgtgatggaccgctgtttgtcgatttagatgatgcccgtaacggtccggcgatacaggatttatggatgctgctgaacggcgacaaagccgaacagcgaatgcagcttgaaaccattattgaagcttatgaagaagttagtgagttcgatacggctgaaattggtctcattgaacctttacgcgccatgcgtttagtttattatcttgcctggttgattcgtcgttggggcgatcctgcgtttccaaaaaactttccctggttaacaggggaagattactggcagcgacagacaacgacttttattgagcagactaaaattttgcacgaaccccctttacaattaacgccaatgtattaatcggagagagttgatcatgaaaaagatttggctggcgctggctggtatggttttagcttttagcgcctcggcagcacagatcagcgacggtaaacagtatatcacgctggataaaccggtcgctggcgaaccccaggtactggagtttttctccttctactgcccacattgttatcagtttgaagaagtgcttcatgtgtctgacaatgtgaagaaaaagctgccggaaggcaccaaaatgaccaagtaccacgttgagttcctggggccgttgggcaaggagctcacccaggcatgggcggtggcgatggcgttgggtgtagaagataaagtcacggtcccgctgtttgaagccgtacagaaaacccagacagtacaatctgccgcggatatccgtaaagtgttcgttgatgcgggcgtcaagggcgaagattacgatgcggcatggaacagcttcgtggtgaaatcactggttgcgcaacaggagaaagccgcggctgacctgcaactgcagggcgttccggcgatgttcgtcaatggcaaataccagattaacccacaaggcatggatacgagcagcatggatgtttttgttcagcagtatgctgatactgtgaaatatttggttgataaaaaataaaaagaacgccggtcactgaccggcgtttttataagatgttttaatctcttctatctgtatatctttcttatcccacagcgtattaagccaacgttgaaaacggcgtttgaatgttttgtcgttcacgtaatcgccgtgcagttcttcatttatgggttccagttgcacccgaacaacaatacgcgtcagcctaccgcttagcatatcgtagaaagggtgacgatcgttgtttgggtaacacaacgtaatattaagcagcttatcgaactgtgagcctaaaacattaatcgccattgcaataccggctgcttttggcggcaacaaatgttgataaggtgaatgcgtttgctgacgtttctcatgcgtaaatcgcgagccttcaacaaagttaacgatagtggtgggataccgacgaaacttttcgcaagagcgacgagttgtttcaacatctttgccgcgtcgatcggggtgtcggagcaggtagctacgggagtagcgcttcataaacggcatatctaatgcccagcacgccaggccgatgaacggcacccaggccaattgctgtttaagaaagtacttattcattgggatatgcttgcggaacagaacgcaaagcacaacgatatcggcccagctgcgatgattacaaatcagtaaataccaatttttcttgctcagcccttctaacccttctacatcccattgcaagtgcggattaaggcgtaacagcgctgcaagaccagcacaccagcaatacatcatgaaattgcagaaaatggagaccttgcgccagataccgggaacaggcaaaagaagctttaccataccggcaatgatgatcggtactgagcaaacaatagtgaccaggatggtcaatacgatactcaatgggagcgtgatagccgcgagtattctcgtcataataaattattcaaaagttagccataaacggtgcgcgaaaagggcgcaaggggctgattctatcagaaaacgatgctaatgatggcgctgagtgaaatagaaacactcgtaacaactatccacattatgataacggcatgaatcagataatcagaaaaacgtgatgttaacaactcattgaaaataatgggtaattattaagacgagaaggctatcgcgctgattttaaagtaatggtaagaatttacacacaaagttatccacaggttattttgcgagcgatcctgaagatcgacaaaacttttccgcaaatgcggcgaaaaactcaagttttcctcctgtatgtggcatcctttaaccataatctgttaaacaggcacggacattatggttcagatcccagaaaacccacttattctcgtagatggctcatcctatctctatcgcgcctatcatgcgtttccgccgttaaccaacagcgcgggagaacctacgggcgcaatgtatggtgtcctcaacatgttgcgcagcctgatcatgcagtatcagccgacgcatgctgcggtggtgtttgacgccaaaggaaaaaccttccgtgatgagctctttgaacactacaaatcgcatcgtcctccaatgccggatgatcttcgtgcgcaaatagagccgttacatgccatggttaaagccatggggttacctctgctggcggtctctggcgtagaagcggatgacgttatcggtacactggcgcgagaagcggagaaggtggggcgtccggtattaatcagcaccggcgataaagatatggcacagttggtgacgccgaatattacgctgatcaacaccatgactaacaccatcctcggcccggatgaagtcgttaataagtacggcgtgccgcctgagctgattatcgactttctggcgctgatgggggactcctcggataatattccgggcgtaccaggcgtgggtgagaagacggcgcaagccttgcttcagggattgggcggcctggatacgctgtacgccgagccggaaaaaattgccggtctcactttccgcggcgccaaaacgatggccggtaaattagcgcagaataaagacgtagcgtacctgtcttataaactcgccaccattaaaacggatgttgagctggagctgacctgcgaacagcttgaagtgcagcagccgattgcggatgaactgctgggcctgtttaaaaaatatgagtttaagcgctggacggcggacgttgagtcaggcaagtggctacaggcaaagggcgcgaaaccggcggccaaaccgcaggaaacggtcgttattgatgaatcgcccagcgaaccggcagcggcgctctcttatgaaaattatgtcacgattctggacgacgttacgctggaaagctggattgaaaagctgaaaaaagcgccagtttttgctttcgacacggagaccgacagcctggataatatcgccgccaacctggtgggcctctcgtttgccatcgaacctggcgttgccgcgtatgtacctgtcgcgcatgattatctggacgctccggatcaaatctcccgccagcgtgctctggaactgctgaagccgctgctggaagatgaaaaagtgcgcaaagtggggcaaaacctcaagtacgatcgcggcgtcttgcaaaattacggtattgagctgcgcggtatcgccttcgataccatgcttgagtcttacattctgaacagcgtcgccggacgccatgatatggacagtttgtccgatcgttggctgaagcacaaaactatcacctttgaagacattgccggtaaaggtaaaaaccagctcacctttaaccagatcgcactggaggaagcggggcgctatgcggcagaagatgcggatgtcacgttacagttgcatctcaaaatgtggcctgagctccagcagcacaaaggcccgctgaatgttttcgaaaacatcgaaatgccgttggtgcctgtactgtcacgcgttgagcgcaatggcgtaaaaatcgatcctgccgtcctgcacaaacattcggaagaaatcacgctacgtctggcggaactggaaaagaaagcgcatgacattgcgggcgaggcgttcaacctgtcctcgacgaagcagttgcagaccatcctgtttgaaaagcagggtattaagccgctgaagaaaacgcctggcggcgcgccgtcaacgtcggaagaggtgctggaagagctggcgctggactatccgctgccgaaagtgattctggagtatcgtggtctggcgaagctaaaatccacctataccgataagctgccgctgatgattaacccgaaaaccgggcgcgtccatacgtcctatcatcaggcggtaacggcgacgggacgtttatcgtccaccgatccgaacctgcaaaatattccggtgcgcaatgaagaaggccgccgcattcgtcaggcatttattgcgcctgaggattatctcatcgtgtctgcggactattcacagattgagctgcgtattatggcgcatctttcccgtgataaaggactgctcacggcgttcgccgaagggaaggatattcaccgcgcaacggcggcggaagtctttggcttgccgctggatagcgtgaccggggaacagcgccgaagtgcgaaagccattaactttggcctgatttacgggatgagcgccttcggtctttctcgccagcttaatattccgcgtaaagaggcgcagaagtatatggatctctacttcgaacgctatcctggcgtgctggaatatatggagcgcacccgcgctcaggcaaaagaacaaggctatgtggaaactctggaggggcgccgcctttacctgccggatattaaatccagcaacgcggcgcggcgcgcgggggcggaacgcgcggcgatcaatgctcccatgcaaggaacggctgccgatatcatcaagcgcgccatgattgccgtcgatgcctggctacaggccgagcagccacgcgtgcggatgattatgcaggtacacgatgaattagtgttcgaggtgcataaagacgacttagatgcggtagcaaaacgtatccatcagttgatggaaaactgcacgcgtattgatgtgccgttgctggtggaagtcggtagcggggaaaattgggatcaagcgcactaagcatttaaggaataacgcgcttttttcgtaattaagcaacataagcacgggggttttgtgatgggtattagaattccctatgtaaagaatgaaaaaaaattacgaaaaggtctttctgtgttgctcaaaaaagagtaaagttattcacgtagggtacagaggtaagatgttctatctttcagaccttttacttcacgtaatcggatttggctgaatattttagccgccccagtcagtttatgactggggcgttttttattgtgcgcaagaaaagtttcgctcacaccgtaggccggataagacgcgcagcggcgccatccggcatagcgggtgattattccccgtcctgaatctcttcgaccggtgccagttcactaaaccagctatccagcttctgacgtaacttatccacgccctgctttttcagcgaggaaaacgcttctacctgcacatcgccattaaaagccagcacggcttcacgtaccatattcaactgcgccttgcgcgcgccgctggccagtttgtccgctttggtcagcagaaccagaacctggatattgctctctacagcccactggatcatctgttggtcgaggtctttcaacggatggcggatatccattaaaacgactaagccctgtaggctttgacgtttctccagatattcccccagcgcgcgttgccacttgcgtttcatctcttccgggacttccgcgtagccatagcccggcaggtcgaccaaccgtttgccatctacgacttcaaacaggttaatcaattgggtacggcccggcgttttagaggtgcgcgccaggcttttttggttggtcaacgtgttcagggcgctggatttgcctgcattggaacggccagcaaaagccacttcaattccgcaatcggaaggtaaatggcgaatatcaggcgcactcatcacaaaatgcgtctgttgataattcaggttagtcaaagcggtcgtctccgtcagtcaaagcattgtggcgattatacctgaacgccagcaaaagacggatttttcggcgcatcggtgctgtaagtaaaagccatacgctttgtgagacattgaccattgcacttatgcgacatgacagagtcgttgtcaggctcaaagccagttaatatagttaaatcatgaatttatagaaaggtaattgtctgaaaaaaagggatttgccgtgtcggtatcttgtgagtttaccccaaaagagtaaagtaatgcacatagcgaggacgctaacaggatcaacgactcaggatgagggtcaggagcgccaggaggcgaagacacaggattgtcaggaagacaaacgtccggagacgttagtaaaaggaaatggaaacaacatggaatgttccaggctaagggaaaaacagggcgtgttgatagccaacagggatggtggaacccgttaagggtcgtgagtcaagaaaaaaggcggcagattactctgtcgccttttttctttgcttgctttctgctagattccgcctcaattctatactgaataaaacggcttaaagatctgacatcatgaaaaaaccaacctctgcaccgcgcagtaaagcctttggcaaacagcgtcgtaaaacgcgtgaagagttaaaccaggaggcgcgcgaccgtaaacgcctgaaaaaacatcgcggtcatgcgccgggaagtcgcgcggcgggcggcaattccgcttcgggcggcggcaatcagaatcaacaaaaagatccacgtattggcagtaaaacacctgttccattgggcgtgactgaaaaagtgacccaacagcataaaccgaaaagtgagaaacctatgctttcaccgcaggcggagttggatttactggaaacggatgagcgcctggatgcgctgttagaacgtctggaagcgggcgaaaccctgagtgcggaagatcaagcctgggtagatgccaaactggatcgtattgatgaactgatgcagaagcttggtctgtcttacgatgacgacgaagaagacgacgaagaggacgagaagcaggaagatatgatgcgcctgctaagaggcggcaactaacgggtttacaccgtgggcttgcccgtcctgcttataacccttccggttatatgttatctggtgtggttattcgttaaactacagcgattgtcgcggcgacagaaatggctgcgcagccggcttgccgcccgtcatggcgtgaagccggtacgccgtacccgccagagacgccatcggaaggagtgagcatgtctgaacagcaaatagactgggatctggccctgatccagaaatataactattccgggccacgatatacctcgtacccaaccgcgctggagttttctgaagacttcgaggacgccgcattcttgcaggctgtggcgcgttatcctgaacgtccgctctcgctgtatgtgcatatcccgttttgtcacaagttgtgttatttctgcggctgcaacaagattgtcacccgccaacagcataaagctgaccagtatcttgacgcgcttgagcaggaaattcgtcatcgcgcgccgctgtttgcagaccgtcatgtcagccagcttcactggggcggcggtacgcctacttacctgaataaagcgcaaatcagccgcttaatgacgctgttgcgtgaaaatttccactttaataccgacgcggaaatctcgatcgaagtcgatccccgtgaaattgagctggatgtgctcgatcatttacgtgcggaaggttttaaccgcctgagtatgggcgtgcaggactttaataaagaggtgcagcgcctggttaaccgcgagcaggatgaagaattcatctttgcgctgcttaatcacgcccgcgatatcggctttacctcgaccaatatcgatttgatctacggtctaccgaaacagacgccagaaagcttcgctttcacgctgaagcgtgtgacggaactgaaccccgatcgtttgagcgtctttaactatgcgcatctgccaacgctttttgccgcccagcgtaaaattaaagatgctgatttacccagcgcgcagcagaaactggatattttgcaggagacgatcgtatcgcttacccaggctggttatcagtttatcgggatggaccattttgcccgtccggacgacgaactggccgtcgcgcagcgcgaaggcgtgttgcaccgtaattttcagggctatacgacccagggcgataccgatctgctggggatgggggtttctgctatcagcatgattggcgatggctacatgcagaaccagaaagagctgaagcgttattaccagcaagtggatgagcggggcaatgcgctatggcgtggtattacgctgacccgtgatgattgcattcgtcgcgatgttatcaaggcgctgatttgtaacttccgcctggattttaacgctgtcgaacagcagtggggtttgcatttcgctgagtattttgccgaagatttgcagttactgtcgccgctggcgaaagatgggctggtggatattagcgagaagggaattcaggtgacggcgaaaggtcgtttgctgatccgcaatatctgcatgtgctttgacgcgtatctgcgccagaaagcgcggatgcagcagttctcgcgcgtcatttagccgggttgcccggtggcgctgcgcttaccaggcctacacgttgcgacaacctgtaggccggataagcattagcgccatccggcacattgtcagctgaacagtcccaccagcgcggcacacaacacggcggctagcgcagtttgtggcgtgtggctgtcgaccgctccactcgataccagattaataatagattctaacataatgaatccccccgtttgccgggcatgatcatactgaactcatcggaacagtaaagcgcaaaatagcagcgttttgcgctcaattattaatctttacactcgcgggtaatgtttactccattcccagctctttcaacttccgcgttagggtgtttcgcccccaaccgagcagcctggcggcttcctgtttatgaccctgcgtatggcgtaatgccgtggtcagtagcgttctctccagttctggctgcgcttcagaaagcaggttttgatgaccggatcgcaaggcgcggtccgcccattgtgccagtaatgtagcccagctatccggcggcaggtgggacgggctatccggcgtcgaggcttcaaacagttcgcccggtaaatcctggatcaatacctcctgtccggcggccatgacggtgagccagcggcaggtattttctaactgacgcacgttaccaggccatgccaggcgcgttaacgccgtttcggtttccggatgtaataatttggcttccacgcctaattcacgggcggcgacctgcaaaaaatggcgcgccaggcgcggaatatcctcacggcgttcacgcaacggcggaagatggatacgaatcacgttcaggcggtggaacaggtcttcgcggaatttcccttcctgaacgcgtcgttcgaggttctggtgggtggcggcgataatgcgcacatcgacttttaccggcgcgtacccgcccacgcggtagaactgtccgtcagccagcacgcgtaacagacgagtctggacatccagcggcatatcgccaatttcgtccagaaacagcgtgccgccgtcagcctgctcgaaacggccctgccggatggtattcgccccggtaaaagcgcctttctcatggccaaacagttcggattcaatcaaatctttcgggatggccgccatattgagtgcgataaacggcgctttggcgcgtgggctatggcggtgaagcgcatgggcgaccagttctttaccggtccctgattcgccgttaatcagcacgctaatcgaagaacgcgacagccgaccaataatgcgaaacacatcctgcatggcgggcgcttcgcctatcatgtctgttgtcgggccgttaacctcgatattacgcggctgttgctgctcctgatagtggctaatcgcgcgctcgaccagagcgacggcttcatcaatatcaaacggtttaggcagataatcaaacgccccctgctgataggcgctcacggcggcatctaaatcggaatgcgcggtcataatgatgaccggaagcatcgggtgacgctgtttaatctgctttaatagcgccagcccgtccattcccggcattcggatatccgacagcaagacgtccggcgttttactggccagcgcagccagtacttcattaccattctcaaaggtggtacaggtcaaccctgccccggcgagagcacgctcaagcacccaacggatggaactatcatcatcgacgacccagactattcctcgttgcataaacacctctatttccgaatcggcaggtaaaccgaaaactcggtatgccccggccaactggtaaattcaattttgccggcgtgttgatcgataagattgcgggcgatagataacccaagcccggtgccgccttcgcgaccgctgaccatcgggtagaacagcgtatcctgtaaatggggaggaatgcccggcccattgtcttcaacgtctatacgcgccgccaggcgatagcgttcgccatgcagcgttaactggaaggcggtacgggtacgcagcgtaatttcgccgccttccggccccagcgcctgcaaggcattgcggacaatattcagcagtacttgctcaatttgttccgggtcgtgcggcagttctggcaaactggggtcataatcgcggataagccggacattatccggcagttccatcgacaccagcgccaccacgcgctccgcgactttatgtatgctctcggtaatgtgcattcccgggtgctgcggccccagcaaacgatcgacaaggttgcgtagcctgtcggcctgttcaatgatgactttggtatattccgttagcgccgggtcgggcagcgccttgctgagtagctgcgccgcgccgcgcaggccgccgagcggatttttgatttcgtgcgccagaccgcgcaccagatcgcgggcggcgatttgctgcgcgtgctgcaactgctcctgactcagacgacgctggttatccatcggcgccatttcgagcagtataaaatcgtcgggcagacgttgggcggtcaaagagagaatatgcgagcgactatcaatcaccagcgtcacttcgttatcggtaaagccttgccctgccgctaaactttcgcgcatcaggtcaatgtttaacgaaaaatagctcaacagttcaggtaacggcgtcccgaacagtttgcgtgagctttgcgcgagcaactgctgcgcggcaggattggcgtaatggattgccagcgcgtcgtcgaccaccagcacgctgttgattaacgaattgaggatctgcccagcatcgggctgtatgccgcttgccattcagcagtctcctggaaaaggttgcaccattttagtgcattatagctttttaccactaaaaagcgcgtgagatcagattgttggtggagaaaaaagcccatcctgggatgggctgaaagtttccacggcaactcaaaaactcctgacgcctttcacgctgctgctgcgttggctgccttcgcttaccccagtcacatcgctatctatgctcctggggatgtgctcagttgctgccttgcagcaacgcgaaatttgtcggatttttaatatacgattaaacgctgtagtacagctcaaactctaccgggtgcggggtcatacgcacgcggtcatcttcttcgcgacgcagcgcaatatacgcatcgatcgcttcatcagtgaacacgccgcctgctttcaggaactcgcggtccaggtccagcgcgttcagcgcttcttccagagaacccgctacctgtgggatctctttcgcttcttccggcggcaggtcatacaggtttttgtccatggcttcgcccgggtgaatcttattcttaatcccgtccagaccggccatcagcagggcggcaaagcacagatacgggttagccgccgggtccgggaagcgaacttcgatacggcgcgctttcggagacgccaccaccggaatacggatggaggcggaacggttacgggcggagtaggccagcatcaccggcgcttcgtaacccgggaccagacgcttgtaggagttggtggtcgggttcgccagggcgttgatggctttggcgtgtttgatgacgccgccgatgtagtacagcgcttgttcagacaggccggcatatttgtcgccagagaacaggttggtgccgttcttcgccagagacatgtggcagtgcataccggaaccgttatcgccgaacatcggttttggcataaaggtcgcggtcttaccgaagcggtgagccacgttatgcacgacatatttgtaaatctgaatttcgtcggcttttttggtcatggtgttaaagcgggtcgccacttcgttctgacctgcggtcgctacttcgtggtggtgcgcttcaacgaccaggcccatctgctccatgaccagacacatttcagaacggatatcctgcgcggagtcaactggcggaaccgggaaataaccgcctttcacgcccggacgatggcctttgttgccgccttcgtacttggtagaggagttccaggcgccttcaatatcgtcaatcgccacatgtgagccggagatagatgcgccgaagcggatgtcgtcgaacaggaagaattcaggttccggcccaaacaggacggtatcggcgataccggtcgcgcgcaggtagtcttccgcacgttttgcgatggaacgtgggtcacggtcataaccttgcagagtgccaggctccaggatgtcacaacggataatcagggtggagtccgcgaagaacgggtcgataaccgcagtggacgcatcgggcatcagcaccatgtcggattcgttaatgcctttccagccgccgatagaggagccgtcaaacattttgccttcttcaaagaattcggcatttacctgatgagcaggaatcgtgacgtgctgttctttgcctttggtatcggtgaagcgcagatcgacaaacttcacttcgtgctcgttcagcatcgtcaaaacgtgttcagcggacatacttgtactctcccggattggtcatggtcggtcgtcgtggtaacgagatcttcaattctgctggccgtgtcgccgtaaaaatataaagcgaaatctgtgccaactttcacattgcccccaaaaggcgttatcatgcgcaccatcgtgcaaaagggctgcaccacggtgactatgttgcaccaaaatagtgctttaatgtgaacattaagcaccacattggtgcaacagaacgcaagccacccttttaacgctccgtgaaagcgatcacaaagagactctgcaatacttgtttgcggaggatgtttgtgatcctgttttgtagtgcgattaatccgtgtacaataacgcgctatttctaatgcctgaggcaaagttgtgatcgaaaatttgcgtaacatcgccatcatcgcgcacgttgaccatggtaaaactaccctggttgataagctgctccagcaatccggtacgttcgacgcgcgtgccgaaactcaagagcgagtgatggactccaacgatttggagaaagagcgtggtattactatcctcgctaaaaacaccgctattaaatggaatgattaccgtatcaacatcgttgatactcccgggcacgctgacttcggtggtgaagtagagcgcgtcatgtccatggttgactctgtgctgctggtggttgacgcatttgacggcccgatgccgcaaacgcgcttcgtgaccaaaaaagcctttgctcatggcctgaaacccattgtggttatcaacaaagttgaccgtcctggcgcgcgccctgactgggttgttgaccaggtattcgacctgtttgttaacctcgacgcgaccgacgaacagctggacttcccgatcatctacgcttcggcgctgaacggtatcgcgggtctggaccacgaagatatggcggaagacatgaccccgctatatcaggcgattgttgatcatgttccggcgccggacgttgacctcgatggtccgttgcagatgcagatctcccagctggactacaacaactatgttggcgttatcggcattggccgtatcaaacgcggcaaagtgaagccgaaccagcaggtcactatcatcgatagtgaagggaaaacccgtaacgcgaaagtaggtaaagtgctgacgcatctgggtctggagcgtatcgacagcaatatcgccgaagcgggcgatatcattgcgatcaccggtctgggcgagctgaacatttccgacaccatctgcgacccgcagaacgttgaagcgctgccggcgctgtccgttgatgagccgaccgtgtctatgttcttctgcgttaacacctcgccgttctgcggtaaagaaggtaagtttgtgacttctcgtcagattcttgaccgtctgaacaaagagctggtgcataacgtggcgctgcgcgttgaagaaaccgaagatgcggatgcgttccgtgtatccggtcgtggcgaactgcacctgtccgtgctgattgaaaatatgcgtcgtgaaggtttcgaactggcggtttcccgtccgaaagttatcttccgtgaaatcgacggtcgtaaacaagagccgtacgaaaacgtgacgctggacgtcgaagagcagcaccaggggtctgtcatgcaggcgctgggcgagcgtaaaggcgacctgaaaaacatgaatccggacggtaaaggccgcgtacgtctcgactacgtgatcccaagccgtgggctgattggtttccgttcagaattcatgaccatgacttccggtacgggtctgctgtactccaccttcagccattacgacgatattcgtccgggtgaagtgggccagcgtcagaacggcgtactgatctccaacggtcagggtaaagcggtggcgtttgcgctgttcggtttgcaggatcgcggtaagctgttcctgggtcacggcgcggaagtttatgaaggccagattattggtattcacagtcgctccaacgacctgacggtaaactgcctgaccggtaagaaactgaccaacatgcgtgcgtccggtacggatgaagcggtgattctggttccgccaattaaaatgagccttgagcaagcgctggagttcattgatgacgacgaactggtagaagtcaccccaacctctatccgtatccgtaaacgtcacctgacggaaaacgatcgccgccgtgcgaaccgtggtcagaaagaagagtaattaacgctcttacggataaaaaccctgccgaaatgaaagctcggcggggtttttttattcacgttgagaaagggataaggttgccaaaaaatcagcaatcgctggcgtattatgccgaccaatgacgctatccgcatacacctttgcccgagcgctggcattccccatcgcgacgcccaatccggctaaacgtagcatttccgcatcgttatcattatcgccaaacgccatcacttcgcgcattgcgatatgctgttgctgtgcatatctggcgaggctttgtcctttgctacaccccttctggagaatatccagttgatgatgccaggaccaggtacagcttagatgtaattcatgctgtataaactcagcaatattttgtagttgttttatgtgccgatgaacgatgctgatttgccagatattctccctactgcttagctcatcagcctgaaagattattttatcatcagcacgaattgtcggtttaagcggatatacccgcgccagtattttttccgtttgtaagtgcgtcagcggcagcgggtgaaggatctgctgttgagccggttgataaatatagcttccgttacaacagatcatcggttcggtgagcgccagcgtttgataatacgcataggcttcacgatgagagcggccggtgacaagcattattcggcagcccatgtcctgcatctgacggatggcggttagcgactctggcagaatttgtttattacggtttagcagcgttccatcaagatcaaaagcgattaaacgatatcgcatgagcgtccgatcctaaaacagcgtgaggcatccaggtgattcagcaatggaatatcgagacggtgctgataagcgagaaaacagtggcattgctttgcctggcaggcgggagaattgagccgttgttgatataaattacccattttaattttgctgatatgacaagcaaaaagatcgccttctgcattcataaaaatactttttcttcctgcggtacagatatccagctgcgctggccactgctgcgtttcaatcacatacagcggatcgagttcgccgaaggcgatggtttcctcaacggtatgccgggtattggcacactcgttggcgttaaaccaaaaataattctggtcaggcaactgctggcggagccaacgaaactggtcgatatctttcatactggcgacagcccccgcgcaccaggttattccggcggcagagagcgctaaacactgctggagaaagcgctcagcggtaatttgtgagggatgaaaagaacaccataaccgaagctttgagatatctccgccgccagcacgaaatgattccagcaatgacattaacgaaaaagaggcgttagtttgtatgccgaccgcctgaacatgaggatagcggctaatttctgccagcgccgccatgtaataacgcaagcgtagcgcctcgccataaggcgtaatcatcacattcaacggcgtacctaaaagaggcaaatggtcaaccatgcgccatagcgcggcttcgtcgcgttttttatcgttacgggcgtgtttatggaacgggcaatagccgcaatgataattacacgatttaagatagccgcgataaaacagcgtgtgaatatcgcgcagggcgggggcgctcatctctgccgattctcccgtagcatcacctcaggcgaaacgaacacaggagcaaggcaatcggataatgccataccggtctccgttagccggaggcgactgccattctgatagcagtaaccctgccgtatgaagcgttcaaggtcggggaaatcccttagcgcatcgctggcaaaatattgctgataatcgctaagagaaagtccctgccagaaaaatagatttttaatgataaagcggcgtttcatttcatcagggggaagcagataaccgtgattaatgacggttttatccgggctgtcgataaacgcctgaatgatttttcgtgatgtttgcaggttcgacgaccacggtgaacagtaatgcagattgccaagataacttctgccgcccgcgccgagcgccagtgagttttcaaatccgcagctttccgccgcggcggatggcgctggattaaggacgaaacggcgcatggacgtttgggtgtagcccgcgttgcgtaaaagatcgcgggctaaaacgtagtagctatgcatattttcctggcgaggcatattataaagcggataaagaaacagctcttccggttgataaacgagcgcctgatgtaatgattccgtcaggcttgcgtgagtctgtccgggaatgccataaataatatcaatattgagtgatggaaaatgacccgcctttagccattccagcgcctggtgcgcgctggcggcattgtggcggcggtgcagcgtatgtaactcgctatcatgaaaactttgtacgccaatactgacgcgattaacggaaaaggcgtttaatagcgctactttttctgctgtggtatccgtaggggaagtttcaatcgttttataaatattccagtcaacattgagcacatcaaagacggaaaaaaataacttctctaattgcgcaatatttaatagcagaggtgtgccgccgcctacggtaaagcttgcccagtgggcgggcgccagcgccatttgtcggccctgggtaataatcgcgtcgatatagctatcaatgaacgtattatctgcgccagtgcaggtaaataaattacagaacccgcagcgactttgacaaaagggcatatgaacatacagatgtgtgtcgtgctcgtaaatgcgcggttttacttcgctaaagctgacgttctccagctcccgataagccgtcttatgcggataactgtacatatactgacgataaatatcattgttattcatattaatgattacagctcagcaagaaatgcatatagggaacggtattaacgatcggatgattaaaactatggaaatatttcccgtcttcgccatagcaggtaccgtgatcggaacagacaataacgaacgtttcgccgccagtttggcggaaaatgttcagtaatccgtcgatgcgggcgtcgatatagcgtagcgcggcggcatgggtctcaacggtatcgccaggggccgcgccctcaacgtaaaaatggttagggtaatgaatcgtgtcgatattgatatacatcatgaccggttggctgccagcacgctcggccatgattttctggatataatggatctggttatccatactctctttaaccgtacaggcaaagcgtggatgccagtaactctctttaaacatcgacgggaacacttttcccatgccggagcggttattaaagaaagagacgccgccaatacagatggtctggtagcctttattttccagactttttatccatgttgcgtcatcaaaggcaaatgcatttttcgggcctttacgaccaagtccgatatcttttgggaaaaacagcatggtctgattaacggtatcatcaataggttttggcataaaacctgaaaacatggcgtgatgcgaaggccaggtaaaattaccggccgcttcgcatttcgtccattgtccataatgattaaggttgggcgtatttccggcggtttgttcctgaagcgcaatgtcgtagcgtaacgagtccagcacaataaaaagaatatgagcgttattactaattagcgcattcatatcgaattcgccatcgcctgtgtcaatcgacgcgtgcagcgagacggggacttcatccattgaattatacattttgcttcctcatggcccggatttgcgcctgataaattagattattctgctgcgcatcctgataaatcaaatcaccctggccattaatttcaataatatacggcgtcaggctggtggtaagtaaaacatcaatacccgctaagcgaatgccagggaaaagtcgcatggcattttgacagagcgtatcgatctcagtcacttttgcggcagataactccagactttcgaagcagtaagcctggttttgcagatgtaagttagtaatgggctgcgaggaggttctgaccactcgccagataatttcgccatccaggcagacgatgcgtaaatcataggttttatgctttacgctggctttgggcagccactgttcgacgaggttttcctgctgaagaacgccattaataatgagctggatatcttctttctgacgatactgttggatttttttgctgttaaatagctgttgtcctgatatgacaatcgcgctgtaaagcacctgctttatgccatcagggtggcggcgcaaagcgataacgcccgccgcgccagaacccagcgagggcttaatgaacacgctggcgacccttttttcctccatgatggcggtgagctgtgcaaaactttttacgtcttccgctaccaacggcggcgtggggatgccgtgttccagtaagcgccgcttgcagcgttttttatccaacaggtgaatgaggcccgccggatggttaagccaggtgacgccaggacgcgccgccatgttctgcaaaaaatggatatagtccagaccgatcgcgtttattttgcggatgtctgtttcactgtgtactggcgggtcgattttaacgatgccagaggtcagcgaagcgtccagcgcttgcggatgagtcagcgccgtgacgggttccccaagtacggcggcagcctgcataaaataatgcgtgcgcttgctctgatgggggccaatgagcgtaatcacaataaatccctttatcgttgagtaggggaatgtgcacattcccctactcaatcactcggtgtacatcgcattcatataaatatcgccatcgtaatcatcaggctccagagcttctgaaagattcaggtttatcggcagtgtggcttttagcttttcctgcatctccggcgtcaaatagtggtggtggagatcgagtgtttccagatgcgcaattcggtctttatgctccagcagcgcctctgcgccgttgtccgttaaggtaccgcatgagagttccagcacgttaagctgcggcaggatattactttccagcacccggcgggcgatatcatcctgctcttcgctgttcatcaaccccagatgggtgagctgagggaaaagatctttcgatgccagcgccatcacgtcatccagcgaaccgtcaaaaccgtatccctctacgcccaggaagagcttcagcgtttttaatgcagggagctgcgcattttgtagttcggcaagtacgttagaagggatgccgccggaaatgatttccaggtgctccagtttctcatgatgtatagcgcccagtcgcagatccgacgcgcctttaataatcagttctttcagattgggtaacgccgcatagagcctggaatagtcaccttgtttaatccaggagatctcgcagtcttcgctctccatatcaccgataaacagtgattccaggtgagtaaagcgggaggcgttctccacaatcatatcaataataggctggcaggtttcgtcttcccaacaatcaccccagttaccaatggtcagtgagcgaagctttggcagatcttcatcggttaaaatcaaattaatgagctgttcctgggttaattcattgtcccaatcaatattaaatcgcttattcatttgtttcccttctctataagcatgaatatggtaaaacgctttgcgaatattatcatggcgcttaggggcgggatatcgggagtctgattcaggatgaatgagcgggcagaacaactacccgctgtgatgctgattcgtaaaatagaggcaataatatcagaagaaatacttcgccccgatacgaatctggttttgctctctatggtaggggcccacgttacgatctaaccagcgtaattcaaagtagggcaaccagtgttcattgatacgataacggaaggtattagtgatttcccaatgatgcttcgtaccattactactattaaaatcattaacgttataaaaatagtgtggttcaaaggtataagaaaatttatcggtaatgataaaattccaatagttaccgatttcatagctgtcattattatccagttcgccattcaaatcggttgaactataattattgtgattatatcggttacgtaccgtaagattaaaccacggggtaaatttatagttaacatccagatagacggcgccgccggaaccaatgcttttgtcgtttattaaccccccaggctggatggttaatttatctgtaggtttaaataatggataccagccctcaatctcattataaccgtgctttaattcatcatcacgctgtagcgtataggtattggtcaacataattccggcccccatatcggagttatagccgacgcgcagcataaactccatttggtcagacgccaggttataggcctcacggttttctacataagcgccagcaaaaacagaggtggatattactgaagttaatatcactagagtattcagagatttcataataaatccatttttcaaatatagggaagccgccatccatcgggatggataaagcggcaagcgtcgtttaattatttacagtagaaatactttgtttattattagtcgcgacaatttgattacctgttttctttcgttgggcaatttcctcgataataaaagcgaaacgttgttcattgagcttataaaaaaagcccatcgttagtgctgcgataatggcaagaccgcaaggccataaaaaaatgagctgacgcaaaccaagcaacgtggtgtcactttgagctatgttggggatataaccgatttgcgtcagcataatacctggcaaaaagccagcaagcgcagcggaaattttgcgggaaaaggtataacccgtatacaccgagccttcagcgcgaatacccgttttccattcaccgtagtcaaccgtatccggaaccagcgcccagttcaggctgttgacgaaagcggtaccgaagaaggcgatacaagagaaaataacaaacaggaatgacgttccaccccagataaaattcaggatatcgccaacggcccacaatatcagaccaccaagataaacctgttttttcccgaagcgttttaccgcagcaggtactaataaaacaccaatcaggatacagcccatgctgaaaaaacccatccatgacaacaaatgaatatcgttcagcacgtactgagtgtaataaacctgaatggccagcttgatattaaaggcggccagcgtgcacaaattggcaacgcagagcaccagcagcggcggattacgaaaaatcgcgcagaaggacttcaatatgctgggtttatgcgtgtcaggtacggtttcgatataccgttcttttaccccgctaaagcaccaccacatgctgaacagcccgcagaccgaaaagatgactgctgcaatcagataacccagcgaaggggaacgggtaaacagcgcctgaatgggcataaaacctacggtacaaagaagaaggccaatggtagcgccgccttgtcgccatgcggcgagctgggcgcgctcatgcggatttttggtaatagcgggtaccatcgcgccgtatgagcagttcatcaggctgtagaacagaccgaacaacataaacagcaccgtcgcgaaggctgttttaacgggtaaagtaaagtgagtggcaaagaattgcgcagtagcaaccagagcgactggaaatgacgcatacagaataaaaggccgaaactttccttttgcgccaatattacggcgtgagtccagcaatacgccggtgagcatatcggtaaaagcggtgaagaatttcgccaccagaaagataattccaccgtaatatgcaggcatcccgagttcatcggtataaaacttcagtagatacagcgtaccgatacacagcatcagatttgagccgaaatcgcccacgccataggcgcatttttcccgcaggctcaactttagcgttagcggatcatgattagacataatcgcctctcaaaacgccccgcagggcgttatattttattgttgttaaaccgtatgtttccgggcctcaatctcttccacaattcgcacgtacatcttctcgttgaggttgtagaaacagcccatcgcaataatggtgatgaccgccagcacgcaaggataaataaagatcaactggcgtaggccttcgacggtgcctgccgattgcaccacattcgggatataaccgatttgcgttagcatccagccggggaagaaccctgccagcgcctgggagaccttacggaagaacgtgaagccggtgtaaaccgtcccttccgagcggacgccggtgcgccattcaccgtactccaccgtgtcggaaaccagcgcccagttcaggctgttgacgaaggcggaaccgaagaacgccaggcaggagaaggcgacaaaactgaccgagccgccgccaaagaagtagttgagcagatcgcctgccacccatattaacagcccgccgatatagactttcttcttgccaaaacgccttacagcgccgggcatcaaaaaaacgccgataaaaatacagcccatgctaaagaagcccatccaggagaggaggatcgggtcgttaagaacgtactgggtgtaataaacctgaatcgccagtttgacgttgaaggcgccaagagtacaaaggttggcgatacacagaataaacagcggacggttaccggcgatggcgcggaacgactgcaataatccaggcttttgcgcgctatcgacaggtttcacttcgacgtagcgctctttaacgccggcgtagcacagccacataaatagcaggccaaacaatgaaaatagcgtggcggcgaaaatatagctgagttgggcattgccttcgatcaggttcatgaccggcacaaagccaacggtacacagcagcaggccgagagtggcgccgccctgacgccaggcggcaagcgaggcgcgttcatccgggttcttggtaatcgcgggtaccatcgcgccatacgagcagttcatcatgctgaaaaccagcccgtacagcataaacagcatcgttgcgacgacggtttttcccgtcacctcaaacggtgtgccgacaaagttagcaatcgccagtagcgttaccggaaatgccgcgtaaagcacgaacgggcggaatttgcccttcggaccaattttacgccgcgagtcgagcataatgccggtacccatatcggtaaatgcggtaaaaaatttggcgatcaggaaaatgatcccgccgtaagtccctggtaaacccagcacatcggtataaaatttgagtaaatagagggttccgatatctaacaggatattagaacctaaatcccccagtccataggcaagtttttctttaaacggcaagcgtagggttgccggattcgatgatgtttgactcattattcttctccatctgcccgcaggtttccctgcgggcgagccgtattagatattccgtaaagaagcaaaaagtgaagcccactcgctcttcgcgcgatagaagaccggcggcttgccaatgggcgcatccacggtaatttcaccgccgtggtgagcttcgccggtccagatattcacccagtgatcttccggcaggtacagcgtccagtcgcaacgcccctgctcgtgaaccggcgcgaccagcagatcctgaccgagcagatattgatatttcagggtgtaggttgcggcatcgttctcgtaatgcaggaatagcggacgcatgaccggcagaccggtagccgcgttttgcgccaccgcctgcttgagatacggtttcagcgtggtaaagacggtggtcatgcgggcaaagtgggcaatagtttccgcgtcgccgtcgaactgccagttatcgccggggcggttgccttcatgggtgcgcatcatcggcgtaaaggcgctgaaatcgcaccagcgcagcagcaactctttgctgcgtttcatgtcaaacagggtggtgtagccgccgatatcgctgtgatgcagaccatggccggtcattgccagcgacaatgccgcaggcacgacagaggccagaccatcatcaaggctccagtcaacgttctggtcacctgcccacatcatggtggaatatttctgactgccggtgtaacccgcacgcataaagaacaggatctcgccgagcttgccggtctcctgtagcgcttcgtagttacatttcgcccagagcgcaggccaggcgttatgcatgatctcggcgctgacgccgttgtgcagatacgtgtcggtcggcagatattcgccgaaatccgccatccagccgctgcagccgagcgcgatcatgctctttttgatgacgtctttgaaccagtcgtaagcttcaggattggtcagatcgaccacgccgccatagaattcgccaaactcgaccagatagtcgccgcccgtggcgtctttcgccagatagccgtgtttcgccgcctcggcgcagaggtctttatcactggcgacgtatgggttgatataagagaggaactggacgccttcttctttccactgtttgatacggctatccagctgtggatagttgtcgctattccacttccagttccacatcacgcgcttgccaaaggaggtcatgcggataccggaccagtcctgcgcccaaataccgttcacttttacgcctgcgttgcgcatggtatccagtttttgctggcaaacttccgtaccgccctgaatgcctagcgtgacgccgtcgtaaacccagtccggcagctccggctggcgacctaacagcgcagtcagtttttccagcagggcgatgtaggtgtcggcacactcaaaacgtagcgtagttttatcttcccacagcgccagttcgtgatactccggcgcgctgaagtcgaaattcatatagcagctattatcgacgtggcagtaatacttctgcgtgctgacaaaggtcggttgcgggaagaaggtccagtaatagtcgccgccggcgttctctttacagtctgcctgccaggtgacatagctggttttattacggccaacgccctgttcgctggtccacagcgggaacggcttgccgcgcaaatcgaaataagagaactgttcgccgcagccgtagatatggtcgtctggattagctgcgagacgtaaccagatacggttatggtgcaggtcgtcgttttgcagatccagctgcaggcgtcccgcttcatcggcggagatgcgaagggtggcgctaattgttgcgccacggctgaattgtaccagccagccgtcaggtagctcgctgacggtggcctccgttaatgcaatcttttcgttaagtttgtctttgatgctaaagttgccgcgaaacatgtcaatgtcggcaacgcccgcgccaatccacagacagggattttcggtgctgtggcgtaaaatcaggcgctgttgccagctaagcgcaaaaccatcctgtgatgttgtcagttcaaaatcggttgaccgttgtggtagagaattcattgtaatctccgtgaatgtagggtaattcggtaatccatttgggctagtcgcagccgatggaaaaatgcagttgatggatcgcttttggggcaagatgaatcagtgcgatcccggaattaaatgcatcgggcgggcagctcataggctctaccgcgagaccttttcggctgagtttttcgccggtatagatctgtaaccagggctgggtgctgcgtaaaaatgtggacatgttctgcgttgggctggtaagtctgacctcccactcagccggggtagtcgcggtcttaaccgcatgatcaaggcgcgtttcgccgagcaggcatgatgcggaaaaatccctgcctgcgggcaattcttcgcttgcaggcagtgttaatacacagctatcgatgctttgcagattgcaagtcaaataaggatgcgcgcccgcgccataaggggctgattcatcgccaatgttttgcgtacgaatcaatacgtgcagcccactggcggcatctaaccgataaatcacttccgatatcaacgcaaagggatagccgtaagagggcggcagaaaaatcgttagcgacgcttccgtcgccgactgataattaatctgccagtctcgccaggctaacagaccgtgaatggcggtctgcgaaaccgggtcgttaacggcaagctggaaaaccttgccgttataggagtagcagccatttgtcacgcgatttggccagggaatcaatactttccccagatgcgccatgggtatttcttccggtttatgcgggatgaccacatggcgtccatgatgggtcagttccgccagacctgcgccaaccgtgacgattttcgcctggtaatggcccgcattaagctgaatagtttttccaccgctgtgcatggctgccatcctcatgacctatttcgcgttgatatccaggagacccgccgcgaccgccggagccaggcccggcgccagtggcagacgaggaatgaccagacagtgcagcagatggtaaatatcttgcttgccgtcccacactttggtggtcactttgttatcggcgtccagctcttgccaccaggaaccattttcatagtccatcaggtacttaatgcagtagtcccaccatttctgataccactcttcatactggctatcgtccgtcagggtgtagagggcgtaggccgtacccatcgcttccacaatcggccagcgcacgcgttcacgtacgataggtttaccgtcccagtcgactgagtagacaaagccgtctgcgccatctggcgcccaggcgtcgcggatagtggcatggaacagacctttcgcatcctccagcagccaggcgggtggcgtttcgaagcgggcctccagcgcagcatggagatggagcatcagacggccccactcaatccagtgaccgggcgtaccgccgtaggcgcggaaacggtgggcaggattatctttgttatagtcgcggatagggttccactgtgaatcgaagtgttcattgacgcggtaatcaccgttgcgcgccacatcatgaataattaccgacgcgatacgcagcgcgcgatccagccattttttgtcatgggtaacgtcataaacaatcaggaacgcttcgacggcgtgcatattggcgttgccgccacggtagtcttccgtctggctgaaggcttcatcccaggactccaggcacatctgctcttcttcactccagaagtatttctcaatcacttctatggtgtaatccagcaatttcctggcttcaggatgcccggtcgtgacggcgctggccgcgcccagcaaggcgaagaagtgttgataaccctgtttagaggcatctaccacgccctgatcgttaacgcaggcataccagccgccgtattttttatcgcgcagcgcgccgttcatggctttgatgccgtgatcgaccagatcataagcgcccggtcggcccatcgacgccgccacggaataaacgtgcagcatacgcgccgtgatccaaagatgggtgcccatctcttctttgatttgccctttatttcccagccagccgaagcctgtcggcaccacggcgtttttaccgaaattaaagatgcggtcggtttcctgctccagccagcggttgtggctcaacgtgttaaaccatttcattctgtcatcctcgtattaacgacgttttgccatcatttcatcgacgatctcgcccagacgttgcaatttaggcgcggaaacatcacgtagcatcagctcggtatccggtaaaccaattactgatgaccagaccgcgcgtcccgccaggaacccggatgcgccagcttccatggcgaccctgactgcgcgagggaacagtttttcgtccacaccggaagagaggatgacccacggcatattgatatgcccattcaggcgttgtgaggcggtaagaagatcggaacgtgcgcctttgccgtagagcggcatttcaactttgtaaagatcggcgccgctgtcgcccagctctttggccgcatcgataatcgcctgctcgcgatcgaacttgtcgccgcagcgcggcggacgtacaaccggttcgataatgctcagcaaaccattggagtgacataattcattgaattctttgaccatattcagacgctgctgcgcgtcttcgtcgctgcgccacagcaccaacagttttaaggctttcgcgccgtcccgttttaccgcctgcgcattaatttttttatcaaggaccacgttatcaacgggaataccgttgcccgggatgaaatcatccgccgcgacgatcatggcgcagcttttagcgaccgcgttttgttctacggcctggcgataacagaactgctgatccagcagaacggcagaggcatacggggaaagaattttcgccgcattcactttgaaatccgtcagcacgctatcggcaacgggtgttttcgcaccagcagcagcaaacattaaacgcatcgcctcgcgctgatcgacagccagcatggcaaacccgccggacgctcgcgtaatgtctttgatggtgtagttgttcattcaattttcctttatacagtcgttacttttttacgttggcggtcagcccggcgctgatgcgcacctgttccaggatggcgctccagtcttcccgaccgcggcctgcggcccgcgccaggttataaacttcacgggaggcggcgccgagcggcatcggtacgtgcagttgattggcgacatccaacgcgatgccaagatctttgtgcgccagatcgatcatgaaggcgggagacagatctcctttcatcactttattcggccaggtggtggtgaaatgccctttgcctgcggcagtgccgctcatcacttttaaagccacgtcgaaggaaagccccagcgcttcacacagcacggcggcttcggcggagagcgcatttagcgcaatactcatgtagttgttgatcagttttacgcgaatacccattcccgggccgccggtgttgaccagctcattacccatcgccatcagaacaggggtagcacgctctacttgctccgccgtaccgcctgccagcagcaacaatgtgccggtaatcgcgttgtcggatgtccggcctaccggcacatccatcatgctgaaccctttgctctgcatgtcggcaatcagattatcggtttgcaacggatgaatagtggacatatcaatgaccagcgcttcacgggaaagagtttcacaaacgccttgctcgccaaacaaaacggaacgaaccagatcgccgttcgggagcatggtgataacaaattcagcgccgatggttgcctgagccgggctgcttgcaggttgcgcgcctttgtctaccagacgctgtacggcgtcgggattaacatcgaagacgctgagttgatggccctgctttagcagattgctcgccataggggagcccatctgtcccaacccgataaatgctataactgccatatcgttctcctgaacacggtggtgtcattttttgtcattaatgagcatttttctgtctgtttgtgatcgtatttgtaatttatagtcaaaaaattgacagccgtcactttttaaacatttcgtgaaattaaaatgagcacatcgaaaatgcttgaggaatgaccatggttcgtattgcttgtgtaggtattaccgtgatggatcgcatctattacgtggaaggattaccgacagaagggggtaaatatgtggcgaagcgctatacggaagtgggcggcgggcctgcggcgaccgctgccgtggctgcggcgaaattgggcgcacaggtggactttattggccgtgtgggcgatgacgacaccggaaacagcctgctggcggaactggaatccctgggggtaaatacccgctatacccgccgctacacgcaggccatgtcgtcgcagtcagcgattatggtggatgccaaaggagagcggattatcgttaattatcccagcccggatttattacctgacgccgactggcttaacgacatcgatttttcgcagtgggatgtggtgttggcggatgtgcgctggcatgacggcgcaaaacaggcgtttacgctggcgcgtcaggctggcgtcatgactgttcttgatggcgatattacgccgcaggatattagcgagctggtggcgttaagcgaccacgccgccttctccgagccagggctggcacgcctgacggggatgagcgaagccattgatgcgctaaaaaaagcacaaatgctcacaaatggacatgtctatgtcacgcgaggcagtgaaggctgcaactggttggaaaaagcggcggtacgccaccaaccgggttttaccgtggaggtggtggatactactggcgcgggcgatgtttttcatggcgcactggcatttggcctggcaagcggatacgccatcgaagaggctgtcagattcgccagcggcgttgccgcgctgaagtgtacgcgcccgggtggccgggcgggtatccctgattgtgagcaaacccgatctttcttgtcactttttgtataatatgagcagtaggaagcttttagaggaatgctcatgagtcttaccgaactgaccggtaatccgcgacacgatcggctgttaatgctaattgatgagcgcggctatatgaatatcgatgagttagccagtttgttggaggtctctacccagacggttcgccgcgatattcgtaaattaagcgagcaggggctgattacgcgtcatcacggcggcgctggcagagcgtccagtgtggtcaataccgcctttgagcagcgagaggtctcctggacgcaagagaaaaaagccattgcggaagccgtggctgactatattccggatggctccacgatatttatcacgattggaacgacggttgagcaggtggcgcgcgcgctgctcaaccataatcatctgcgcattatcaccaatagcctgcgcgtcgcgcacattctttataataaccctcgttttgaagtgatggtgcctggcggcacgctgcgcccgcataatagcggcattatcgggccatccgcggcggcgtttgtggcggggttccgggctgactatctcgtcaccagcgtaggcgcgatagagagcgatggcgcgttactggagtttgatgtcaacgaagccagcgtagtgaaaaccatgatggcccactcgcgacatattttgctggccgccgatcatacgaaataccatgcttctgcggcggttgagatcggcaatgtgtcacagattaccgctctgtttacggacgagtatcccggtccggcattacagaatttacttcaatcccagcaaatcgaagtggttcaggtgagtccttcgctggacgacgccgtttcagcgtgacaagcgcccttgcgccggagggtcgcgtcagcgctttatccggccaataaaacggcgctgtgatgcaggcgatattgaacatcgtctgcgtttctattgtctttttgttaattgatttataaagggatacatagtcaaacttctcctttcccgctacagttattcatccccggttagcaaggagaatgacatgctctacatctttgatttaggtaatgtgattgtcgacatcgactttaaccgcgtattaggtgtgtggagcgatctgagtcgagtaccgctggcttcgctgaagcaaaaatttacgatgggcgagacttttcaccaacatgaacgcggtgagataacggacgaagcgtttgctgaagctttctgtcatgaaatggcgttatcgctcagttatgaacaatttgcgcacggctggcaggcggtatttgtcggattacggcccgaggtgattgctatcatgcataaactgcgcgagcaggggcatcgcgtggtggtgctatccaatactaaccgactgcatacccacttctggccggaggaatacccggaggtgcgcgctgccgccgaccatatctatttatcgcaggatttgggaatgcgtaagccggaagcgcgtatttatcagcacgtcctgcagaaagaaggtttttccgctgccgatgcggtctttttcgacgacaatgccgataatatagaaggggccaaccagttggggatcaccagtattctggtgaaggataaagccaccatccctgactatttcgcgaagctgttatgctaaaaaccgttcaccaaaaagctggacgccatacgcgccctgttcgggcctggctcaagctattatggcagcgtatcgatgaggataatatgacgactctggcgggaaacctcgcctatgtctcattactctccttagtaccgcttattgccgtcgtttttgcccttttcgctgcttttccgatgttttctgatgtcagcattcagttacgccattttatttttgctaactttatgccagccaccggagacgtgattcagcgctatattgagcagtttgtcgctaattccaacaaaatgacggcggtgggcgcctgtggactgattgtgacggcattgctgttgatgtacgccattgatagcgccttaaacactatctggcgcagcaaacgcacacggccaaaagtgtactcttttgcggtgtactggatgatcctcacgctcggcccgcttctcgctggcgtcagcctggcgatcagctcctacctgctttctttacgctgggccagcgatctgaatacggtcatcgacaatgtattgcacatccttccgctgctgctctcgtggatctcattctggttactttacagtattgtcccaacgactcgcgtaccgaaccgtgacgcccttgtcggcgcgtttgtcgcagcgttgctgttcgaggccggaaagaaaggtttcgcgctttatatcaccatgttcccgtcatatcagctcatttatggcgtactggcagtgatccctatcctgtttgtctgggtatactggacctggtgtatagtcttgcttggcgcagaaataactgtcactctcggggaataccgaaaactcaaacaagccgcagaacaagaagaagctgaccaaccatgattgcattaattcaacgcgtaacccgtgccagcgtcaccgtggaggacgaggtgacgggtaaaatcggcccaggacttttggtgttattgggtgtcgaaaaagaagatgacgaacaaaaagcgaatcgtctgtgcgagcgcgtgctgggataccgtatcttcagcgatgctgacggcaagatgaatctgaatgtacaacaggctggcggcagcgtgctggtggtgtcgcagtttacgctggcggcagataccgagcgcggtatgcggccaagcttttccggcggggctgcgccggatcgcgcgcaggcgctttatgaatattttgtcgagcgctgccgccagcaggcgataaacacgcaaaccggacgcttcgctgccgatatgcaggttgagctggttaatgacggccccgtgacattctggctccaggtatgagtcagcttccggcgtggccgcggataacaagagagagtacggctatgtatcaccttcgagttccgcaaacagaagaagaattagaacgttactaccagtttcgctgggagatgctgcgtaaaccgctgcaccagccgaaagggtcggaacgggatggctgggatgcgttggcgcaccatcaaatggtggtggacgaagaaggaaatttagttgcagtgggccgcctttatatcaatgcagataacgaggcgtctatccgttttatggctgtacatccctcggtacaggataaagggctggggacattaatggcgatgaccctggagtctgttgcccgccaggaaggcgttaagcgcgtcacctgcagtgcgcgcgaagatgcggttgagttctttgccaaactcgggtttgtcaatcagggggagattactacgcccacaaccacgccaatccgccattttctgatgattaaaccggtagcatcgctggatgatatcctgcatcgcggcgactggtgcgggcagcttcagcaggcctggtatgagcacattccattgagtgaaaagatgggggtgcgcattcagcagtacaccgggcaaaaatttatcaccacgatgccggaaaccggtaatcaaaatccgcatcacacggtgtttgccggcagcctgttctccctggcgacgctgaccggatggggacttatctggctgatgctccgtgaacgccacctgggcgggacgattattcttgctgacgcccatattcgctacagtaaacccattagcggaaagccaaacgccgtggctgatttggggtcgctaagcggtgatttggacaggctggcgcggggtaaaaaagcgcgtgtccagttgcaggttgaactgttgggcggcgagaccgccggagcaattttcgaaggcatttatatcgtactacctgcgaaaccgttcggcccgtatgaagagggcgggaatgaggaggagtagctggacatatccaactactcgatgaaggcatctgctggtagtttgaagcgttgtgtaagcgctttaatatgattaaccgttagtgctctgcggccatttaagatgttgctgacgttcgatttagaaccaagttcgttggcaagatctgctgctttgagaccgtattgatccatgagcgttcgcaatactgaaacgccagggggcgttttctccaggtgttggttgagtgctttgaattccggcgcatgtttttcgtattcactgattcgggcacagagcaattcaaatagtgggttttcaagatcgtcgtggtcgaccagaaactccactagcgctagtgccctgcgatactcattgtcatttcggtcttcccccatcagtgggacggtttttaccgcatcgctgaaggtatcaacgatcttttttgcgctggttgcatccatctgacgatgagttctcattctttattaccccgatagtatgcggtcagtttgtcatattcggcatgggaaacgatatgtttcacaaatatcttatgtaacctgaaatctatgtaggaaatgagtctcaggctgttaccagaaacatcaatcacccaccatttatctctgtacttaaaattatccagtgaaggaatataccgcttcatctcttcaggctgagtgaatgtttttttctccagaacattcagcaactcagtgagagcaagctcatggtttggatacatgagcatcgcttcattgaacggttttcggctgataacatgcacaatgtagttccattacaaagttttcaacctgaaaacaatttagcgcaacgttatccagttttcaagttgaaaacaaaattgaattttaggtcattttgcctgttgatggacttacaacacgccaggccacatctcgcatggcgcttcgtgccgcctggctcacgcctccgagctggaaaaagccatggatgacaccgagatagcgctggcaagtacattccacaccctgttcctggaaccgttgatacagggcctcgccctcatcgcgcagtgggtcgaattcggcagtaatgatgtgcgtggatggcagtccggcgaagtcctcacgccagagcggactggcttcaggatgcagtggatcggttcgcggcatatacatctcgtagcctgaaagcagcgtgtcacgcgtgataatgtaatccagcccattacaggtgtagctcgcaaacctggcggttgcgtccagcatggggtagatcagaatcagctgtgcaggttgccattgacgggcggctttcaggcgtagcgcggtgaccagcgccagatgcccacccgcgctgtcaccagcaagcgtaatgttctcgcgatctatccccagtttctgggcatatttccagatagtattggctccggtttcggcatcgttatgtgcggccgggaaggtgtgatctggtgcaagtcggtactgtgccgcaatcacgcgacaacggctgtaaaaagctaactgccttaactggttatcgtgagtggcaaaaccgccgctgacaaagcagccaccatgataataaatgatgcagggtaatttccctgtggcattgagcggcgaaaccacgcgaaacgtcatggcatcgagttcaatatcttcaacctggacgcgggtttctgtttctcctgccagtgtcgtgctggcgatgtagcccgccctccggtcatcaatattctgttcgcgagaagaggggcggcccgcggcgataaacccagcgaccagttcggcaattcctttttccagtggcatataacgctcctttgactgtatgtatgtacagtttataacctggttcgttggggatggaaagtggtgaaacgaggggataatgattctggatagaggttcgcaaaaaatggaatgcggttggcgctgggtttttaatttttgtactgtgaaacgatgatgctatacgccattgacgtatagattattttcactactataagccaatggcgtatggaatatgcaatttatagaaacggaactctttactgaagatgttaaaaaactgctcgatgatgatgaataccataagcttcaggtttttatggctcagcatccagattgtggtgatgtcattcaggaaacgggcggcctgagaaaaatgcgctggggagcgcgaggcaaaggaaagcgtagtggcgtgcgaattatctattttcaccgtagtcaacggtatgagattcgcttgcttctgatttatcaaaaaggcattaaagatgatctcacgccgcaggaaaaagcggtgcttcgtatgctgaatgagaggtggtagatggataaagtgttatttgagcgattaactcaaagtatgtctcaaatgaatgaaatcattgaagggacccgtgaaccttctcgtacctttcatattgatgcaatgaagattaaagaaatacggcaggcatctgggttgtcgcaatctaagtttgcagagctgatttcggtcaacgtggatacgctgcgcaactgggagcaaggaagacgttcaccgacagggccagccaaagcgttacttcgcgccattgccaacgacccgagaaacgttatacaagcattgcgttattgagcaatgatccggctaacgtagattgctagccggtataccagagaacttattccccttccccgggaacaggaacgggttgatggaactgcgggcgaagccctcctgttccatgcgcgcgtccagcaccagcgaggcgaggtcgtcggccactgcttctactttcgggtctttttcctgatagagaatcttcaggtaagtcccgcaatcgccgcagctttcggctttcaccgcagcctgctcattttccagcgaccagtagtgtaagtcgcggctctgttcgcagttactgcattttacgcgcacgacatgccattcggtttcgcacaggttacagtgcagataacgcagcccctgcgtggtgccgatctgcaccatgctggagaccggcatcgaaccgcacaccgggcaatactggcgcgcttcaccgtattccgcgcgggctttgcctggaatcaagctggccatttgcgcccagtaaagggagagcgcggcccagataaagggggctttatcgctgctgacggaggcaaaatccgaggcaaacagcgcgctggccatctgctccagctcctgctctgaggctttctccaggttctcgatcaccgccagcgcggggccgctcatctcgggttttagctcggcaattaacgaatgcagcagtttttgccagtgcttatcacgcggcagcacgtggatatccagcggcggcttgccctggtcgttcgcttctttaatacgtgcggtcagatccatctccagcggatggtcgtacagcaccacttcctgcgcgtgcgcgataagcgcggcaaagcgcaggtaatcgcccagcgggttattttcagccagctcgcgcagacgttcggcgcggcggttgtagacgtttttgagtcgggggaacaataacggcggaatcatatccgccgtacgtttctcgctcgaccccagctcatcttgcgggattatgcgaatactcattcagtttctttttccgttgtcttgcggacttctcggtaccagcgcgggtgatgtttcttcgcccacgaccgggttacccagccttccaccatcgcggtaatggtgcctttcacccaaagggcggcgtagatatgcaccatgataaccacaattaacgctactgcggcaaaagaatgcaacattaacgcgaatcggatcaccgggattgagaaagcaggcgcaaagtacggacgccagataattaccccgctcaccagcagcagcaccaggaagataatcgccgcccagaatacgcatttctgaccgaagttataacgcccggtgtcacccacttcctcgttgacgacgatcttacgaatattcttcgcccaaaagatatcatcccgattgattagattgtggtgccaataacggaaaaacatgatgatgaacgaggcaaacataaccacgcccacaaacgggtgcagaattcgcgccagttgcggggtgcccaggatatgcatcaaccagttgaaggatgggaataaaaagcccagcccgctcaccgccgccagcacgaagcagaaagcgacgatccagtggttgatgcgttccggcgccgtatagcgcacgatggtgtcacgtcgtttcatttgcgcacctcgtctttctcttcatgcaggttgtcatcttcctcttccgcgcggttcgggccgacgccgacatagtggaagacgctggcggcaaaggtcgcggcaaaaccgaacgcggcgagcggtttccagacgcctttccagaacttaacggtttcgctgatttccgggttttccggcagaccgtgatacagattcggcttgtcggcatgatgcagcacgtacatgacatgcgtaccgcctactcccgccggatcgtacagacccgcgttgtcataaccacgggtttttagttccgccacacgctcgcccgccagcgttttcatatcctctttcgagccaaaatgaatggcgccggttggacaggtcttcacgcaggccggttcttgcccgacggtcacgcggtcaacgcacagcgtacatttatagacgcggttgtcttccgggttgaggcgcggcacgttgaacgggcagccagcgatacagtagccgcagccgatacactgctcggactggaagtcgacaataccgttagcgtactgaatgatcgccccttccgccggacaggccttcaggcagcctggatcggcgcagtgcatacagccatccttacggatcagccactccagtttgtcgttctgttccacttccgagaagcgcatcaccgtccaggatttcgcggttaagtccgccgggttgtcatacaccccgacgttattgcccacttcatcacggatgtcgttccactcggagcacgccacctgacacgctttacagccgatacaggtggtgacgtcgatgagtttcgccacctcttcctggtggtcccgcgcctggggcgcgggggtgaaaccgttagtggcggaacgacgaatgatgtcttgcgattgataagccataggtcgtctccgttacaccttttccacgttcacaaggaaggatttaaactccggcgtttgcgtgttcgcatcaccgacgaaaggcgttaacgtattggcgataaagccttttttcgccacgccttcgtagccccagtgaataggaataccgatggtatcgatatccttgccgtccgctttcagcgtgcgaatacgcttggtcaccaccgctttggctttgatatagccgcggttcgaggagaccttcacggtatcgccatgcgcgataccgagcttattcgccagcttctcgccaatttccacaaactgttccggctgggcgatagcgttaagcaacgcgtgcttggtccagtagtggaagtgctcggtcagacggtaagtagttccgacatacgggaacttatccgctttacccagcgcgtcggcatcgtctttaaagatacgggcggcagggttagagataacgttcgggtgcagcgggttagtgcccagcggcgtttcaaacggctcgtagtgttccgggaacggcccttccgccatcttatcgatagcaaacaggcgacccatcccttccggctgcatgataaacggtccgacgtcgctgccgggcgcggcggcgctgtagtccggaatatcccatccggcccattttccgccttcccatttcagtagctgacgtttcgggtcccagggattaccctgcggatcggcggaggcgcggttatagaggatgcggcggttaagcggccatgcccatgcccagcccagcgtgttgccgagaccagacgggtcggcgttatcacgacgcgccatcatgttgccttccggcgtccagctaccggcgaaaatccagcagccgctggacgtcgtaccgtcatcgcgcagttgcgcgaacgaactgagttgttggcctttcttcaccaccaccgcgccggttgccggatcgataagatcggccagcgctttaccgttactttccatcgccacttcttcagaggcgggttcgtatggtttggtgtagttccaggtcatattcagcacctgttccgggttggcgccgccctgttcagagtacatcttacgcaggcgtaagaagataccggcgaggatttcgccgtcggtcatggcaattcccggggcgtccgcgcccttccagtgccactgtaaccaacgaccggagttaacgatggaaccattttcctcggcaaaacaggtggaaggcagacggaacacttcggtctggatttttgcgggatcaacgtcgttcgactcaccgtggttttgccagaaggtggacgtttcggtgttgagcggatcgatagtcaccaggtacttcagtttggaaagcgatgcgaccactttgtttttgttcgggaatgaggccaccgggttaaagccctggcagatatagccgttgaccttgccctgtttcatcatctcgaagtactgcagtacatcgtaccctttgtcccacttcggtagccagtcgaagccccagctattttccgctgtcgctttatcaccaaagaaggccttcatcatcgagacgaagaatttcggatagttgccccagtagttgacctgatccttcaacaatggcttcggcgtattggcagccagataggtttgcaggtcggtctgtttttcgctcggcagcgtcagatagcccggcagactttgcgacagcagtcctaagtcggtcagtccctgaatgttggagtgaccgcgcagggcgttaacgccgccgcccgccatccccatgttaccgagcagaagctggatcatcgccatagtacggatgttctgcgcaccgatggaatgctgcgtccagcccagcgcgtacaggaacgacgctgttttatcttttgcgctggtttctgcaatgtactcgcacactttcaggaagtccgctttcggcgtaccgcagatattttctaccatgtccggcgtgtagcgtgagacatgctgtttcaacagattccagacacagcgcgggtgttgcagtgtcgtatcgtgtttggcaaaaccgttttcgtccagctcatagtgccaactggttttatcgtactgacgcttgtcggcgtcatagccagtgaacagaccatcatcgaagccaaaatcttcacgcacgatcaggctggcattggtataggcctcggtgtattcacggttgtatttttcgttggtcagcagatacagcatcacgcctgacaagaaggcaatgtcagtaccagagcgtattggcgcatagaaatcggccaccgacgcggtacgcgtaaagcgcggatcgatcacaatcagcttcgcgccgttgtgaattttggcttccatcgcccagcggaacccgaccgggtgagcttctgcggcgttaccgcccatcaccacgacgaggttggcgttcttgatgtcgacccagtggttggtcatcgcaccgcgaccaaatgttggagcaagacttgctaccgttggtccgtgtcagacacgcgcctggttgtcgaccgcgagcatacccagcgcgcgggagaatttttgcgttaaataacccgtctcgttactggatgcggaagcgcacagcatcccggtggtgagccagcggttaacggtaacgccttcggcgttctgcgcctgatagttggcgtcgcgatcttccttcatcagtttagcgatgcggtcaaacgcttcttcccaactgatttgttgccacttatctgaacccggcgcgcggtattgcgggaatttcaggcggctttcagagtggataaagtccaccagaccggcccctttcgggcacagcgcgccacggcttaccggatgatccgggtccccttcgatatggaaaatagatgctttggcgtttttcgcaccgtcgccgaggctgtacatcaacagcccgcagccaacggaacagtaggtgcaggtgttacgggtttcgcgggtgcgcagcagtttatattgccgtgtttccgctagcgctacgccgggcgcgaagcccagtgccgccgccgtggtgcctgccataccgccagcgcagatcttaaagaactgccttctgctgacctgcatggtttgctccttgtttcgacattgtcacttctctttcacatttctctatccgaaacgctcagggagtggttgttatttttctttgcggacgggcccgcaaaggttcagaattggataaattttcctccatccgggaggagttgtaacagaataccataatgttggtgtgtgtgttcttatatggttaaaagaaagtgaacaatatactgtctgaagaagtcctaaatgtgactgatttcacaacctcacgccagttgactctctggaaacgcgaggatttgcagtccccccaacttgatgatgttgccgaggaagtgccagtggcactggtgtataacggcatttcgcatgtcgttatgatggcctctccgaaagatctgacgcattttgcaatggggttttctctgtcggaagggatcattgacagcccgcgtgaaatctatggcatggacgttgtaccgtcctgtaacggacttgaagtgcagattgatctttccagccgtcgatttatggggctgaaagcgcgtcgtcgcgcgctggccggacgtaccggttgcggcgtatgtggcgtggaacagctcaatgacatcggtaagccggtgcaaccgctgccgtttagccaaacgtttaatctcggtaaccttgatcgcgcgttaaaacatctgaatgattttcaaccgacgggtaagctgacgggttgtacgcacgctgcggcatgggtcatgccgtcgggtgaactggcggggggccatgaagatgtcggacgccacgttgcgctggataaactgctcggccgccgcgctacggaaggtgaggaatggcggcaaggcgcggcgctggtttccagtcgcgcgagttacgaaatggtgcagaagtccgcgatgtgcggcgttgaaattctgtttgccgtctctgccgcaacgacgctggcggtcgaggtggctgaacgctgcaatctgacgctggtggggttctgtaagccgggtcgggcgacgatttatacccatccgcagcggttaatcgcagactaaaatagtaccctctacatttgcgtaaaatatatattttctcaattttacagcctctcttgataacggaatcacgtatagtggcgaggccatacaggttttaatcgtttttatgctggaccgcagcttattccagccattcacgaggcgcttgctacccggtaatacttcgaacgaaaaaagcgcccctggggcgctcttttggcagtcgctaacgacttatttgctcagtttagcggttatatgcacgcgatttgcagcgtgaaaagcttagaactcacgctcaagatgatagccattataggtgtcgatgagttcgttataagctttaaccacagcctcataagaaccatctaccatatcgccgctgccgctattgaggtagtcctgctcatgcgaggtatacgccacgttatcgcgcacgcgccgaatgcgttttttcaccttgccctggaatttttccagctcagaaataaagccagggaagctacgatgtttatctatatcaacgttgatcttctcgtttagcttctgagtatgctcttcaaaatcagcgagctgtttgcttactgccgccacatcaaaagaatcatcagctacagcgtcattaagcgtctcggcttcctgcatcgtcaaaagcgtatagtacttaatggatttaccttctttcttctcggtcgccttaatttcattagccgcatgctgcccactcataatggtaatctcggcgatatatttcttcgcaatgggatcaaactcatcgaactgttttataaacgttttatggaacgctttagcgccagcaaaggcatcatccttgaagttatcttgatcatagtatttattcatactattgattgtttcagctagtggcccagccgcattaataaatgccagagcagcactatccagagaggcaaacgccggctttaattcagccgccgccttgatgtctttccggcagtcctggataaatgcaggatacacaggaaccagcggagagggatcgtcttccttaccggtagggccggtgcggaaatcgtcgaatgtgttagcataacgatttacagcacggtaaatatctgcctggagattattataacaatcaatgtaaacattcagcttttggttaagaacatcgttcgcatctgcgctttccgctgatgtgggttgtgtattgctcgctgatgagtccgcactctgagctacaggttgttcgtccgcttttttttcatcacaagcgcttagcccggcagtcatcagcatagcgataataattgatgataacaaatcctttttcattagaataacctataaataatatcattgaaatttacagattcattttaatgaaaaaaaacaggtatgtgatttattcaacacaaaaaatacttaatgcatatttcattataattaacattatcaatatcaatgtgttcgttaaaataagagaaccccaacgtaaatatacaaaaggcaattaaatgaaaaggaatttattatcctcagcgataatcattgcgctaatgaccctgggcgcaacaggatgtgatgacaataatgttaaaaccgaggcgacgccggccgccagcagtcagcctgcgacgccagcgccttctcagacgccggaaacgcaatctggcgaaagtccagcgcagccctcagcagcgaagccagaaacggcaactcagcccccggtggcgaaaccagaaacgccagctcagccggaggttgacgctgaagaagtttatagtgaaaaaatggatgtctatatcgattgttttaataaacttcaattgcccgttcagcacagtctggcgcgttacgcggattgggtgaaagactttaaaaaaggtccgacagggaaagagagcctggtttatggcatttatggtattacggagtcttacataacgaattgccagaaagagatgaaacaggtggccgccttaacgccattacttgagcctattgatggcgttgccgttagctatattgatagcgccgccgcgctgggtaataccattaacgaaatggaaaaatattatacccaggaaaactataaagatgatgcctttgctaaaggtaaggcgctgcatcagacattactgaagaatatcgaggattttaaacccgtctcggaaaaatatcatgaggctattcaggaaataaatgacaggcggcaattgacacagttgaagagaatagaagaagcggaaggcaaaacatttaactattattctctggctgtcatgatttcggcaaagcagatcaacaaggttatttctgccgatacctttgatgccgaagcgatgatgaaaaaagtcgcggaactggaaacaatgattgcgcaattgaaagaagtgaatactgatggccgtaattcttctttcatcagctctgcggctgattatcagctacaagctaaaaaatatattcgtcgcatcagagacaatgttgagtattctgattttgaaaagaaacgggtgcaggaccctgcaacaggatggatggttgcggattcttatccggcgtcgttgagaagttataacgagatggtggatgattataaccgcctgcgttgagtgacggcacattaactgcgcacaggctggcgcaagtgcctataaaattacgcgataacgccaataaaaagcgccgatcaggcgcttttttcgttcatgtattcttcatcaggcaatatccgtaaaaatagctgacgtaaacattaactaaagagagttattagaaaaaccagtaatctgaagctatcacaagatgttgacgtcacgctggaaggtactggtagtgtcattgaggatcggcatttatatggaaagcatttatccccctgatgcgaaaattctgagctacttcagcatagggcggcccagccttcatcacttatagggtgtcacgtccaactgttctgtaagacgttaattaatacctgccagccgcaacagtgctgtcactaccgcagcggcgataatcaccacaataagcggcattttacgccaggctaaaaatacggcgaagccaaccccaagaacgcgcgccattccggcaaaatgttcgccttcgtaaaaggtggtcgccagcgcgacggagaatagcagcaccgttgccgcatccgagagcagcgcctgtgaacgctcagacagcgccagacggctgccaagtttcgcgccgccgaggcgcatcaaataggttcccgcagacaaaagagcaataccgataataaatagcgtcatattgcccattattttttcctcgccagtaggccaagcagcgaaagcaacaccggcaatccggcagccacaaaaggaacggcggcaagcgacagcgcggcgccgctgcaaccacgaatcaatgtggtgcggtttttaaacgccgggatcaccagcgccagtaagattgccgggaatacggcatccagaccgatggtttctggggccggaagcagtttgccgacaccagcgccaatcagtgtgccaatcggccagaatagggcgacgcccagaccgcatagccagtaggcggctttacgttgttcgggtgttttttgcgacaggccgaacaccacgctctcatcattcataatatggcagccgaaaaagctggcggcgcgggtgccaaccaaatcgcgcaccgttacgccaaacggcacgtggcgcgcattcaccagcagtcctgccgccgccgccgctaacggattgccgccgctggcaacaatgccgataaacataaattcggacgcgcccgccagcacaaaaatagagaggacaaacggcacccacagtgggaaaccgtaggccatcgccagtgagccataggacatgccgacgacgcccacggccaggcacactaaaaatatcgcttttatcgtgtctcccttgagacaggaaaaatagtgtttcatcttctttagtcatatcgaacgaattttcattataatgaacggaacagatttgctttacaagacgaacatttcgttcgttatagtgaacgttggatgctttatgacacaacctattagcgtcattgccagaagtctggtacgcgaacgccagcgaaccggactgtcgctggcggagattgcgcggcgcgcaggcatcgctaaatctacgctttcacaactggaagcagggaacggcaaccccagcctggagacgttatggtcgctatgcgtcgcgctcgacattccctttgccaggctgctggagccgcaggtacaaaaaacgcaggtgattcgccgcggagaaggcaccaaagtggtggcggagcaggcgcattatcaggcgatattactggcggcgtgtccgcccggcgcgcggcgtgatatctatctgctgttgacgcagccgggggccgaccggatctctcatccgcatccgccggggtcggtggaacatattattgttacgcagggaaaagccctcgtcggcttaaccgaggcgccggaagagctggcggagggcgattacatttgttatcccggcgaccaggcgcatatctttaaagcgctggaaccggatactcaggctatcctggtagcggagcagaattgaaattgccggatggcggcgtaaccgccttatccggccgacaaaaaataaaaccgtaggcccggtaagcttgcgccatcgggcacacgacttactgcagatagaacacctcttttagctctgcgctgaccgggctgttatccggattcgcgggcataacgtcacgcatatgtttccaccaacgctggcaaacgtcggtgctggcaacggcgttccagcgctcctcggattcaatctcaacggtggcgaacagcagattgcgctcctgatcgagataaatcgcgtagtgatgcgcgccgtgagattttaatacggcttccagctccggccagattgggttatgacgacgctgatactcctcgtgcgcgtcggcatttacctgcatcacaaaggctttgcggatcataacgcctccaggtacagcccgcgaacttcatcgcggctggcggtgcgcgggttacacggcgcgcacgggtcggcgagggctttatccagccagccttcgatatcttcttttgtgacgcccagcttgctgaaaccttctggaatgccgacgcgtttgctcagcgtacggatagcgttaatcgcttcctgacttgcggcttcgtcagacataccgcgcgtctctacgcccatcgcctgtgcgatacgggcaaaacgcgcgacggcgttcggacggttaaagttctcgacaattggcagcaggatagcgttgcagacgccgtgcggcaggttgtgagttgcgcccggctggtgcgccagcgcgtgaaccagccccaaaccggcgctgttgaacgccatacccgccaggtactggccgaatgccatttgctcacgggcttcgaggttatggccatcgtcaaccgctttcggtagccacaaattgattaagcgaatcgcttccagcgcgttagcgtcggtaagcggatgcgcgccaacggagacataggcttccaccgcatgggtcagggcatccatgccggttgcggcggtcacagacgccgggatttccagcatgacgctggcgtcatccacggcaatatccgggatgatattcgggtcgatgatcacctctttgaccttacgggcagagtcgataatcaccgcgttgctggtcatctcggccgcggtacctgccgtagtattaatcgctaccagcggtacgccggcgtttttcactttgccgacgccggagtaggcggtggaagggccagggttggcggtgaggattttcaccgcttttgcggtatcgatcgggctgccgccgccgaaggcgataatgtagtcacattctgcgctctgatacgccgcaaaacctttctgcaccagctcttctgtcgggtttgggaacacctcatcaaacaggtggtaagacatttgatgttcatccagtgcgctaaacaggctatccagcaggcccagctttaccagttgaccatcggtaacgatcagcgctttgccccattgcttattcgccacgaggttcaccatatcggcaatcgctccagcgccatgcaggctaatttttggcagtgccaacataaagctcatcactattctccttaaaaaaattccctgttgcccgatggcgctacgcttatcgggcctacggtaaaatgcgcaccgtcctgtaggccggataaggcaaagccgcatccggcgttgagttgggaggtatcagtacagcgctacggcgctggccagcggtgtcacaccaaaacgtttgccgagtgcgaccagttcttcgcgcgtgatggtctgcttcataccgcccatcgaatagattttgactaatacctcagcggatttctctgcggtatctatcaaaccgaaggtttcatccagcgtaggtccgcttccgaacacgccgtggaacggccacagtaccagcgaatgtttctgcatttcttgcgcggtagcctggccgatttcatcggtgcctggcaccatccacggcagaatgccgacaccgtccgggaataccaccaggcattcggtgctgccttcccacagtttgcgggtgatcagcgcagtgttgttttccagtacgtaggtgagggcgatcaggttagtcgcatggcaatgcataatgacgcggtctttgccgtgggtggctttgatgcgttcgcagtgggagaggaaatgcgccgggagttcagaggtgggtaccgcgtcgtgggttaagccccacagaatgtggtagcctgcgccgtcactgtcgattttgaccacgcctaaattggctgccggatcgagctgcacgttgcggaagaatttgccggaaccggtaacgataaacggcgtattcgccagcagcggcatgggttgacttagcgcgatgtagcgcggtttttcgtggaaattagctgcaaacggtgcgatatcggcttcatccagacgcagcgtcaggttaccgccattacgttcgtcccaccctttcagccacgcatcagacgtggctttaatcatgccctggacgaaccaggaatcggtaatattttgcatgttcgtgttcccatttattgcccgaaggttattcgggtcttacgtaggccggataagcgcagcgccatccggcaatcgtgtttcatttattgccggatggcgacgcgggcgtcttatccggcctacagatcaggtgtcgctgtcagctacgtttgctcaggatctctttttcatagacgcgaacgctgtccagccactggctgccagccggcgtgtcgtgacgctggcaatacatttcccagacggcctgccacggcagagatttttgctcttccagcagcgccagacgcgcggtgtaatcgccgctggcctcaagctgacgcagttgatctgtgggttccagcagagcgcgcagcagcgcttttttcatgttgcgggtaccgataacccacgcggcgacacggttgatagaggcgtcgaagaaatccagaccgatatgcacacggtcgaacaggttatgacggacgatttcgctggcaattgcctgggtttcatcgtccaggagtaccacgtggtcgctatcccagcgtaccgggcggctgacgtgcagcagcagccgtggcacatagagcatggcggcggaaattttgtcggaaatcacttcagtgggatggaagtggcccgcatccaggcacagcgcggtctgacggctggtggcgtagcccatgtagaactcattggagccgacggtgtagctttccgcgccgatgccaaacagtttgctctcaacggcgtcgatgtggtgcgccgggtcgaatttctcgctaatgacctcatccagcgcttccagcaggcgctggcgcggggctaaacggtcgacggtaatgtctttcatgccgtccggaatccagatgttcatcaccgacggcgtaccgagctgctcaccaaagtatgccgagacgcggcggctggctttgcagtgatcgatccagaactggcgaattttcgcgtctggatgagagagggtaaaaccgtcagcgttcagtggatgagaaaaacaggtggggttgaaatccagccccagccggttcgctttcgcccactccacccagtttttaaaatgctccggtttgatctggtcgcgagcaaccggcgtatccgactcaaggtaaatggcgtgtaggttcagccgttttgggcctgggatcagacgcagcgcctgttccagatcggcgcgcagttcggtggcgttacgcgctttgcccggatagttgccggtcgattgaattccgcccgtcagcgaaccttccgggttctcgaatccggcaacatcgtcgccctgccagcagtgcatggaaaccggcaggcgatcgagctggcgcagcgcctcctcgacatcaatacctactgcggcgaaacgttgttttgccagttcccaggcttgttccagttgagtggtcatgcgcaaagctcctttgtctgtcgtttgggttgaaactgcgcaacgtggcgggcaatttcactatcaggattagggatataggttgtcaggtcgtagttagcgctgacgacctgacggaagtcatcgacgttgtttaattcgtcgagggtcataagctgaataccaatattgccaagggtggaggcttcaaccggcccggccatcacgcgaatgccacatgcatcggcgcacaactggttgagtagcgagttttggcatccgccgccgacaatatgcagttgggtaaatttttcgccgcgcagatttgcctgttcgtgcagaatgtcggcatacaacagcgccagactgtcgaaaatgcagcgcgccagttcggcatcgctgacgggaacgggctggtcggtctcgcgacaggctgcctggatttcagcgcgcatatcgtcaggattgataaagcgatcgtcattcgggttaatcaggaaacggcaggccggcagcgcttctgtttgggcgataagcgcaggcagatcggtaatgcgccgttctttcagcacacgctggagcagccacaaacccataatgtttttcagtacccgataacgcccttccgcgccgccttcgttggtgatattggcggccagcgcctcatcagtggtgtagggcattttgctttcaaaacccatcaatgaccaggtgcctgaagacaggtaagcgctatgtttatttgccagcggagaggcaataacggcgctggcggtatcgtggctggcgacggctaccaccggaatacggttgccctgcgggcaaatccagtcgccgataacattgccagggtgcgaggggcgaccgaaccagctctttttcgcgccagtccacgccagcagggtatcgtcccagtcatcggtattgatattgaccaactgggtggtcgtggcgttggtgtattcccagttcatttcaccggtcaggcggtagctgaaataatcgggcatcagcagcgcatgagcgacctgcgccgttaactcaggctgttgtttcgtcagcgcgcgtagctgatagatggtgttaaacggcagaaactgaatcccgctgcggcgatagatttcgcttttgccgatctggaccagcgcttgcggcatgatgcccgtggtacggttatcgcggtaggagaccggcaggccgacacgctgaccttgtttatccagcaggacataatcgacgccccaggtgtcgatgccgatgctgtcgataagaatgccttcattgcagactttcttcagaccaagacggatatccttttccagactgtcgatgtcccaggtgtcaaacccgtctgttttttgtaggcagttcacaaaacggtgaatttcacgtagcgtcagggtacggtgtttgctgtcgtaacgcgccagcatcacgcgcccgctggatgcgccgagatcaaccgcgacacaatggcgaaaagtcataatcaggtccttcttagagtcattgcgcacagtctaaaaaagccctcaaagacctaccttctcgttactgacaggaaaatgagccgctggcaacaaggcaaagatgaacgtgatagcgttcacagtttctactaataggccggtgtgatgtcgtccgcatttcccgctttttcccgccttttcttgaaaaaaagaccatgtttgcgcgctttagcgtcaaaaatttaaggtgaggccgataacccttaattactattcggacatgttgaattcaggaggaagcaaccatgaccgtactgcatagcgtggatttttttccatcaggtaaagcgcccgtggcgattgaacctcgtctgccgcaagccgctttccctgaacatcatcatgattttcatgaaatcgtgattgtggaacacggtacgggcattcatgtattcaacgggcagccgtataccatcagcggcggtaccgtgtgttttgttcgcgatcacgaccggcatttatatgaacataccgacaacctatgcctgacgaatgtactgtggcgttcaccggacgccttccagttcctggcggggttggatcaattgctgccgcaggagcaggatggttactatccttctcactggcgggtgaatcagagtgtgttgcagcaggtgcgccagttggtcggtctgatggagcgcgccggagacggcatggatgcgcctgccgtggcgaatcgcgaaattttgtttatgcaactactggtgttgttacgccgcagtagcctgatggaaggcgcgaccaataacgacgccaaactcaaccaactgatggcatggctggaagaccattttgcggaggaggtctgctgggaggcggtagctgaacagttttcgctgtcgctacgcacgctgcatcgtcagcttaaacagcataccgggctgacgccgcaacgttaccttaatcgcctgcgtttgatcaaagcccggcatttattgcgccatagcgatcatagcgtgacagaaatcgcgtaccgctgcggttttggcgacagtaaccacttttcgactctgtttcgccgagaatttaactggtcgccgcgggatatccgtcagggacgcgatgcgataatccagtaacgcgaacgctatcaacgttttcgtcgccaatatgctgataattataccctttaataccggatggcggctgcgccttacctggcctacggcggcgagcggtagacagaataagcgtagcgccatccggcaagcattcaacatgaggtgctgcggtggcaaatcagttaatccttttgaaaaaagatttttttactgatgagcagcaggccgttacggttgccgatcgctatccacaggatgtttttgcggaacatacgcatgagttttgtgaactggtgatggtctggcggggcaatggcctacacgttcttaatgagcgcccatacagaattacccgcggcgatctgttttacattcgtgctgaagacaaacactcctatacttccgttaacgatctggtgctgcaaaatattatttactgcccggagcgtttgaaactcaatgtaaactggcaggcgatgattcccggctttcagggagcgcagtggcatcctcactggcggctgggcagtatgggaatgaatcaggcgcggcaggtcattaaccagcttgaacatgagagtaatggacgcgatccgctggcgaatgagatggcggaattgctgtttggtcaactggtgatgacgttaaaacggcatcgctacgcgaccgacgatcttccggcaacctcccgagaaaccctgttggataaattaattaccgctttggctaatagccttgagtgtccctttgcgctggatgcgttttgccagcaggaacaatgcagcgaacgggtgctgcggcagcagtttcgcgcccaaaccgggatgacgattaatcaatatttacgccaggtccgtatttgccacgcgcagtatctgcttcagcatagcccgctgatgattagcgagatttcgatgcagtgcggttttgaagatagtaattatttttcagtggtgttcacgcgggaaaccgggatgacgccgagccaatggcgtcatctcagtaatcaaagcgattaactggccatgcctaaaccgacaatattcgccgcgataataattaccacgcagccgaggcttaatacagcaacgggacggcggccagcatttttccactcttttagcaccagaccgacaagccccccgcacagcacatagaagctcatgtgcagcatccagctcatgtagtcatattgcgctggaatgcgcgcgtgaccccaggcatagaaaaagaactgcaaataccacatcagaccgccaagcgcggacagcagaatattgctgataatcaacggtcttgccagcgagaagtcggcttttatcgacagattttgtacttttgccaggcggataaaacagaaaccgaggttcaccagcgcgccgccgcccataatcaccacgtaactcggcagcgcgacatagagcgggtcaacgccaagcgcggcagcagcttcatgcatcggtttcgcggcgttcatggcaaaagacattcccgccgagaaaataccgcacatcactgccagcagaagccctttcttcagattgaactcctccgctttaatgcccattttgcgttcttttaactgtccggcgcgcgtcacaatcccgacgccgatcagcgcgacaaaaacgccaagtagcgtcatgcgtcccccttcggtatgaattaacacatcgaagttaccgttgatgataggcgtcatcagcgtgccgacgataagcgtaatgccgatagcgatgccgatacccatcgacatgccgagataacgcatggtcaggccgtagttaatattgccgatgccccacatggcgccgaacagaaaaaccggtaaaagggtggagaggttaaactgcccataataggcccagaaatcaggcagtaacagagcgctaattgtccacggcagaataagccatgagacgatgccgcccactgaccacatggtttcccatgaccactgtttcacttgcttgaacggggcatagaagcaggctgcactggccgcccctatcaaatgccagaaaatacccatcgtaatcgcgttactcatgacatgttcctcattattttttatggacgggataccccttccgtttgcatgagtttaaaaattacgcagcctggtaaccttataacgattgccgccgttgggtgtattctggcaatcagcacgttaatgaagtgattaacttcacgttttaaaaaagtcggagcgcatcgtgaccgtctggatgttatttaaatcagtgggtaatatttgttttctaaaataccttcatcataacgacacgaaacgacttagctggcaacaatgcaaagaaaacgctgcgtgaggtcacataatgggaatagtctgacttaccgtttgataaaagggtagttatacagtaattatttggttgttttatttgtatttacaatttaaatatattgaaattaacgttaggaatcaattaaatataaatataaggaaatccctatattggcgttgttgatggtgttttgatttttattttatatgacgaatatgaatttcatttattttattttgctttttgaacattatcccaattttaaattaaagatctttgtctatattgtcgccattcacattgcgtattatggttgtaacggtctgacatgaaacaacgttttaattttaaattaaatggattctgttatgagaaaatctcttttcttactattacctcttgttgtaacaaatgcgcatgcagtatatgtcgatgttcgtcatgaatatcttgatgacagtaaagctaactatgaccgtgcgtatatttctcatcggtttgcgaatggtgttggttttgcgatagaagctatctcaaaatcaggcggggatgacaccaataaagcgtttaatgacctagaaacacagggcaacgaatatacgataagctaccaatttaaaaccggtgatgtcgcctggcaaccgggtttcgtgctggaaacaggcaacggttactctacctataagccttacttccgcgcgacgtggacattaaatgaaagctggtgggttggcgcgcgctatcgttttgaatatgtacgccgttcttctgatatccgtgatgatgataccatcaatcgtatggatgtctgggcgggttataaatggaacaactttgactggacaatcgaaggaatttataagaaagccgataaatatgatctttacgatggcggcaaagataactatgaatataacttcagaactgcctatattattgaccaatggtcgccattcgttgaggtaggtaatgtttccgtcaatagcaacagcgatgaaagacaaacccgtttccgcgtgggtataggctacacattctaatcattatccctgtttattatttattcccttttccggctactttataggtagccggttttttttacctggtgatgacctgcggataattattatcgcgcgttggccggataagacgcgaatcgccatccggcaacgagatgtgcaggaaactatgcgcttacatgatgcccagtagacggggtaagaacagtgtgatttccggaatgtaggtaattaataacagaacgccgataatcgcgccgtaaaaaggcagcaacggtttaatcacttcctcaactttgaccttaccgacgctcgccccgacatataaaccactgccaactggcggcgtaatggtgccaatcgccaggttatagatcatgataatgccgaaatgcaccggatcgacgcccagtttagccatgattggcagcagaatcggggtaaaaatcagaatggccggaccaatatccataaatgcgccgataatcaacaaaaagacggtaatgactaacaggataaccagtttattggcggaaataccgaggatcatatcgctcagcgccgcaggaatattggtgatcgacatcgagaaggacatcgccgaagaggttgccagcaggaacatgatgaccccggtcattaccactgtctggagcaaaatcgaaggcaaatccttaattttcagcgtgcggtaaaacaccatcgtcagcaataacgtatacaccacggcaatcgcggaggcttcaatggcggtgaaaatcccctgcacaatgccgccgacaataatcacgatcagcagcaggctgggaatggcctcaacggcaacttttagcgccatacctttttggacggtgaagaaaacccgataatttcgacgcttagcgaccaccagcgtgaccagcatacagccaacgccccacagcactcccgcgaccagaccgccggcgaacagagcggcaatcgatgttcccccgcttgccagcgcgtaaaggataaaagccgtggtgggcggaattaacattcccgtcggcgcggaggcgatattcaccgcggccgcaaagccgcgatcgtaaccttcgcgcgcgctcatcggcaccatcacgccgccgatggaggttgaggcggcaatcgccgatccggaaattgcaccgaacatcatattgccgacgatgttggtataagagagcgagccgggcagtttgccagtaaacagtttggcaaaattgaccagccgggcggcaattcccccgctattcatgatcaccccggacaaaacgaagaacggcacggccagcaaggcaaaactgtccaggctggagaacattttttgcgcggtggcgaacatcgaaatatcgaaaggcagtaccagcatcatggtgctgaaagaggcgataacgatgcagatcccgataggcgcgcccatggccagtaaaacaacaaagacggcaattagcgtacaggacgcaaaaatagggtcaatcatgtgatttctccagagtgtgctcagtggtatccgtggcggaatggatagctttcagggcgtcaacgatattcagcagcccatagaggatgatcagtacgcccgcgcaggggagcgcgtaataaatttttcccatcggaatgcccagcgcaggagagatttgcagcatagaaatcgcagaaatctttaagccgccgataatcaatacccaaatggaaaacgcgataaaaatgacctgcaggataatatcccaccagccgcgaatcgtcggcgacaccttatccagtaagagagtcaggctaatatgctgtttctgaccggcgacaaaagccatgcccagcattgatacccacaccaggagaaatcgcagcatctcttcggtaagggtgctgggaacgcccagaatgtagcggctcaccacctgccagcaggcgatgccaaccattatcgccagcaccaggcaacagatagcgcccagcaataaatcaagtccttttctgaatgtgttcatcttaatttcctgattagattaattttttgctgtctggatacgttgatacagcccgtaaagccgcggtttgtttttcagaccgtcgtaaataggctgtactgcctcctggaagggttttttgtcgatctcgtagaattcaacgttgaaatcttttaccgccgccagcctggttttctctatttccttgtcccatgcggctttctcaaattcgatcgacgccttgatggcggcttcgacgatgcgctgctgttccggcgtcagcttttccagcgtgagggtactcattagcaggatatcgggaatgcgggtgtgcatatcgtaggtgtaataacgggcgacttcgccgtggcgggcgatggtgagagcgaactcattgttttccgcgccgtcgagaatgccttgttgtaatgaggtatagacctccgcctggctcatggcgataggcgaagcgcccagcagtttgagggtttggatcgccgtctcactctgcatgacgcggatctttttcccgcgtaaatcctcaatgcgtttaatcggcgctttgctcatataaaaattacgcgcgccggaatcataccagcctacgccgataaacccctgcgcggcggtggactgataaacaggctccatcacctgcgggttatccattacgcggtagtattcctcgacggtggcaaacaggtagggaagtgagaacacgccgtactcaggcgaaaaactctccatcagcccggacgacactttagtgatgtcgacgacgccgacctgcgtcaactccaccagttcgcgctcgccgccaagctgtccgtccgggaagtactgtactttgatatcgccgcccgttttctcttccacttgctgccccaggaagtgcaacgcatcttttaccggctggctattttcagcgtaggccaggcgcaaaatggtttcgccgtgggagaagaaagagagtgtggagagtaaggccaacgtagccagacgtataaaaccaggttgcttcatgattccctcgcaattgtaataatttaccgggaatgtaattgcagtgtgaaattataaccttcttgattttgccaccgctgacaaaatttggcaccaaaagaaagattttgaaaccctgtttcacatttcatgatttccaggaattcatcaacaggcggtttcggttggaggcgtaaaaaacggtttttttcagcggatgccgtaacgtttataaccctggaaaaagtacggcattgataatcattttcaatatcatttaattaactataatgaaccaactgcttacgcggcgttaacactgtgccgctcgacaataatggagatgattatgagttatacactgccatccctgccgtacgcttatgatgcactggaaccgcacttcgataagcagacgatggagattcaccacaccaaacaccatcaaacctatgtcaacaacgctaacgcggcgctggaaaacctgcctgagtttgccagcctgccggttgaagaactgattactaaactggaccaggtgccagcggacaaaaaaactgtgctgcgtaacaacgcgggcggccatgctaaccacagcctgttctggaaagggctgaaaaaaggcaccactctgcagggcgatctgaaagcggctatcgagcgtgacttcggttccgttgacaacttcaaagctgaattcgaaaaagcagcagcaacccgtttcggctccggctgggcgtggctggtgctgaaaggcgacaaactggctgtggtttctaccgcaaaccaggattccccgctgatgggtgaagccatttccggcgcttccggcttcccgatcctgggcctggacgtgtgggaacacgcttactacctgaaattccagaaccgccgcccggactacatcaaagagttctggaacgtggtgaactgggacgaagcagcagcgcgtttcgccgctaaaaaataatttgcattgcacgtctgtagaagcgagtctgatgactcgctttttttgtatccgcgtaaggagcagcagatgcattatccggttgacgtgtttattggcaaaattcgtgactatgacggcagccgcccgagcgctatcgccaaggtgcaaatcgacggcgaactcatgctgaccgagctcggtctggcaggcgatcagcaggccgaaaagaaaatccacggcggccccgaccgcgcgctatgccattacccccgcgaacactatgctgattggattcgccagttccccgagcaggcgacgctgttttgcgccccggcgtttggcgagaatctgtcgacgaacggaatgaccgaacacaacgtgtttattggcgacatctaccgctggggcgaggtgttgatccaggtcactcagccgcgctctccatgctttaaacttaatttccactttgccatcagcgacatggccctccttatgcagaacagcggaaaaaccggctggctgtatcgggtcattgcgccaggtaaggtctccagcgatgcgccgttggaactggcgtcgcgtctgagcgatgtctcggttcatgaagcgggtgttatcgcctggtctatgccgtttgatgacgaacaatatcaccggctgttgagcgccgccgggctgtcggcgagctggagccgcaccatgcagaagcgtcgtttgagcggcaaaattgaagatagcgccagacgactgtggggggataaaactccgccaaaatgaaaggaaggattatgactgaagctgaaaatgcggtggcgatcgtaaaagaatttttggtggcctcgatgattcccgatgctgaacgcgccgcaacgtatatgcacccggaggtgaaaattaccttcaccggaggccgggcaatggctggcgcggcagatatcgcgcagtttaacggcgctcgctacaagtgggtgaagaaggcgctgggcgagtttgatgcggtgcagcatgatcattacgttgtgatttattccaacggtacgctgtatggggaatggcccgacggtcgcccgtttgccggtaatcgctttatcgatcgtttcgaagtgcgcgatggcaaaattacccggatggacgtgtggaacgacagcgccgagtggattctggtgccggaaatctcccggtaaatctcgacggcgagataaaaaatcggcctgcattcgcaggccgatggtttttaggttcgcttgtacagcggtagccacagcgtaagccgcaacccacccagcgggctatcgtcagccttcacccagccgcggtgctgctgcatggcgctttcgacaatcgccagccccagcccggtgccgccagactcgcggtcgcgcgcctcatcagtgcgatagaacggacggaagatctgctcgcggtcttcagggctgacgcccggcccgtcgtcatcgaccgtgatcgtaataccgtctttatccaccgagaagccgacttcaatcttcgtatgtgaatagcgcagcgcattacgaactatattttccagcgcgctttccagcgcgtttgggttgccatagagcggccacggccccggcggataatttaccgttaacgacttgcccatctgttcggcttcaaaggcggcgttatccagcacttcgccccatagctgattggctttcatcgtttcgctgaccagcgcatttttctgttggttacgcgacatcaccagcaggtcattgatcatgctgtccagacgctgcgcttcggtttcaatacgctccagctctttgctttcgccgccacgacgacgcagcagcgcggtacccagttgcaggcgcgtaaggggcgttcgcagctcatgggagatgtctgacagcaaacgctgctgcgaggtcatcatccgttccagcgccgtcaccatctggttaaaactggcgccagcggcgaggaactcctgcggacccgcctccagctccggatgctgacgcaggttgccttgcgccacttcatcagccgcgtttttcaacttacgcgccggtttcgccagactccatgccagccatagcaagagcggcgaactgaccagcatcgtgacaatgagcaacagaagcgggcggtcaaacagcagattaataaaatcggattgcgaactgctggccggtcgaatcaagtaaagctggtaattatcctctccgtcgcgaacggagaacggccccaccatctctacgcggccatattttttcttctgcggatgatcggcgttatccgcctgaccaatgaagttacgaatgatctgcatttcgctgcgttcagcgccgatcacgcgtccttcagaggtcaccagtaataaccgctgtccaggcggcgcccacttatcgatcgcgcggaacaggcgacgccaccacatcaggtcgttgggcggatcgttcgcaagttcagcttctacatgttgctctatcatcaatccctggcgctgttcgctgtccagcagctcggtcatctggcgtgaatcgagcttgggcaacatcaggaccagcattagcaccagcgccagcgtcaaccagaagatggcgaagatgcgcgcggttaaacttcctatcatgaagcggaaaccatcagatagccgcgaccacgcaatgttttaaaccacgggtgaccgtctttgcgttccggcagtttgcggcgcaggttagaaatatgcatatcaatggcgcgatcgaacggcgtcaggcgcttacccagcacttcctgacttaaatgttcacgggaaaccacctggccgaggtgttgcgccagcaaatagagcagggtgaattccgtaccggtcagctccagcgtttggccatcgaaactggcttcctggcgacccggattaaggcttagcgcatcgacttccagcgtcggcgagccgttgtcgctgctctgctgctgttcgctccagtgggaacggcgcaaaatagccctgatgcgcgctaccagctcgcggtcgttaaatggtttgggtaaatagtcgtccgcgcccagctcaaggccgagaacgcgatccagctcgctgccgcgcgcggtcagcataatgacaggcgtctggtgtgtctggcgaagcgctttcaacgtatcgataccgtttttcttcggcatcatgacgtcaagcaaaagtaaatcgatgctgtcatccaaaagctcaagcgcctgctcgccgtcgtgggccaccaggacattaaaaccttccatttcgaggagctcttttaacagggaagtcagctctcggtcatcatcaactaacaggattttattcattgtttacgtacctccgaggcagaaattacgtcatcaggcgtcgctaatccatgactttacgttgttttacaccccctgacgcatgtttgcagcccgaatcgtaaactgtctctcgttgaatcgcgacagaaaagattttgggagcaagcgatgcgcaaagttaccgctgctgttatggcctcaacgctggcattcagttttttaagccacgcagctgaagttgttacaagcgataactggcaccccggtgacggggccacgcagcgtagcgcgcaaaatcatatgtttgacggcataagtttaaccgaacatcagcgtcagcagatgcgagatcttatgcaacaggcaaggcacgaacagcctcctgttaatgttagcgaaatggagacaatgcatcggcttgtcaccgcagaaaaatttgatgaaagcgctgtgcgcgctcaggcagaaaaaatggcgcaagagcaggttgcccgccaggtcgaaatggcccgcgtgcgtaaccagatgtatcgcctgttaacgccggagcagcaagcggttttgaatgaaaagcatcagcaacgaatggagcaactgcgcgacgtggcgcaatggcaaaaaagttcatcgttgaaattattgagtagtagcaactcacgttcccagtaacaaccctgttttccttgccatagacaccatccctgtcttcccccacatgatgtgggggttttttttatctccagtttgtcattctgttattagcttactgttttaaaccatccgttatactaccggcagaagatagcgggagtatttatgaatcaaacctatggacggctggttagccgggcggctatcgcggcaacggcgatggcatcagcgttacttttgatcaaaatttttgcgtggtggtatacgggatcggtgagtattctggcggcgttggtggactcgctggtggatattgtcgcgtcattgacgaatttgttggtcgtgcgttattcgctgcaacccgcagatgatgaacacacgtttgggcacggtaaagcggagtcgctggcggcgctggcgcaaagtatgtttatttccggttcggcgttgtttctgtttttgaccagtattcagaatctgattaagccgacgccaatgaacgaccccggcgtggggattggcgttaccgtcatcgctctgatatgcactattatactggtcacgtttcagcgctgggtggtacgcaagacccaaagtcaggcggtacgggcggatatgcttcattatcagtctgatgttatgatgaacggagcgattcttatcgcgctggggttatcctggtacggttggcatcgtgcggatgccctgtttgcgttaggtatcggcatctatattttgtatagcgcgttacgtatggggtatgaggcggtgcagtcattattggatcgcgcgctgcccgatgcggaacgacaggaaattattgatatcgtgacgtcatggccgggagtcagcggcgcgcacgatctccgcacgcggcagtcagggccgactcgctttattcagattcatttggaaatggaagataatctgccgctcgttcaggcgcattttgtggctgaccaggtagagcaggcgattttacagcgttttccgggttcagatgtcattattcatcaggatccctgttcagtcgttcccagggaaggcaggaagttcgagcttgtataattgattgttaaaaagtgagccaggccagcattttgtgtataaattaccgccatttggcctgacctgaatcaattcagcaggaagggattgttatactatctgtatattcgttggatcgtttcgaagtgcgaaatcggcttccggcaatagatttcattttgcattccaaagttcagaggtagtcatgattaagaaaatcggtgtgttgacaagcggcggtgatgcgccgggcatgaacgcggcaatccgcggtgttgtgcgcgcagcgttgacggaagggctggaagtcatgggcatttatgacggctatctgggcctgtatgaagatcgtatggttcagcttgaccgttacagcgtatctgacatgatcaaccgtggcggtactttcctcggttctgcccgtttcccggaattccgtgacgaaaatattcgcgctgtcgcgatcgaaaacctgaaaaaacgcggtatcgatgcgctggtagttattggcggcgacggttcttatatgggtgcaaaacgtctgactgaaatgggcttcccgtgcatcggtctgccaggcactatcgataacgacatcaaaggcaccgactacactatcggctacttcactgctctcggcactgtagtggaagcgattgaccgtctgcgtgacacctcctcttctcaccagcgtatctctatcgttgaggtgatgggccgttattgcggcgacctgacgttggcggcggctattgctggcggctgtgagtttatcgtggtgccggaagttgaatttaatcgcgaggatctggtggcggaaatcaaagccgggatcgcgaaagggaaaaaacacgctatcgtcgctatcaccgaacatatgtgtgatgttgacgagctggcgcactttattgaaaaagaaacgggccgtgaaacgcgtgcgacggtgctcggccacattcagcgcggtggttccccggtaccttacgatcgcattctggcttcccgtatgggcgcgtatgctattgacctgctgctggagggccatggcggtcgttgtgtcggtatccagaacgagcagcttgttcatcatgacatcatcgatgcgattgaaaacatgaagcgtccgttcaaaagcgactggatggagtgcgcgaaaaaactgtactgattgtttttgcgcgcctgatggcgctacgcttatcaggcctacaggttgcagaaacgtgtaggccggattaggcgttagccgccatccggcaatccctcagatttattcctcgaagttatagccaatctttttttattctttaatgtttggatctctttctggcacgctttgctcatcacaacacaacataagcgagtctggcgatgaaaaagtggggcgtgggattcacattattgctggcgtcaaccagcattctggcaaaggatattcagttacttaacgtatcgtacgatccaacgcgtgagctgtacgagcagtacaacaaagcgtttagcgcgcactggaagcaggaaaccggcgacaacgtcgtgatccgccaatcgcacggcggttcgggtaaacaggcgacttccgttattaacggcattgaagccgatgtcgtgacgctggcgctggcttacgatgtggacgctattgcggaacgtggtcgtatcgataaaaactggattaagcgtctgccggataactcagcaccttacacctccaccatcgttttcctggtccgtaaaggcaatccaaaacaaattcatgactggaacgatctgattaaacccggtgtgtcggtgattacgccaaacccgaaaagctctggcggcgcacgctggaactatctggcggcatggggctacgccctgcaccacaacaataacgatcaggccaaagcgcaggactttgtcaaagccctgtttaaaaacgttgaagtgctggactccggcgcgcgcggctcaaccaatactttcgttgaacgcggtatcggtgatgtgctgattgcctgggaaaacgaagcgctactggcgacgaatgaactgggtaaagataaattcgagatagtgaccccgagtgaatctattctcgcagagccgaccgtttccgtggtcgacaaagtggtggaaaagaaagacaccaaagcggtagcggaagcctacctgaagtatctctactcgccggaagggcaggagatagcagcgaaaaacttctaccgtccgcgcgatgctgacgtggcgaaaaaatacgacgatgcgtttccgaagctgaagctgttcaccattgacgaggtgtttggcggctgggcgaaggcgcaaaaagatcacttcgctaatggcggtacgttcgaccaaatcagcaaacgctaaaccgtttataaacccggtaacgtattatgttaccgggttttttctttgccacaattttgcgttactcttccccgtctatgggtcacagggaacgcatatcatgaaaaaaacaggctactttttactggcggtgatagtgattgtcgccgcggcgggcgtcggttactggaaattttccggcaaccctgatgcattacgggaaatcgtgcttgaacaatgcctgcccgatcagttacagcatcaaaacccagcgccgtgcgcggaagtcaaacctcgcgctggctatgtcgtctttaaagatcgtcacggtccgttgcaatatttattgatgcccacctaccgtatcaacggtacagaaagcccgctattgctggaacccgctacgcccaactttttctggctggcttggcaggctcgcggctatatgagtaaaaaatacgggcatgatattccggatagcgcggtctcgctggcgattaattcgcggcttggtcgttcacaggaccatttgcatatccatatttcttgcatccgtcctgacgttcgggaacaactggataacgatctcacgcgcatcagcactcgctggcttccgctgccgggtggcctgatggggcatgaatacctggcgcgccgggtaaccgagagcgaactggcgcagcgtagtccgtttatgatgctggcggaagaggtgccggaagcgcgcgatcatatgggacgctatgcgctggcggtggtacgccaaagcgacgactcttttgttctgctggcgaccgagcgtaatttactgaccttcaatcgcgcatcggcggaagagattcaggatcatagttgcgccattttgtcttcccgctgattttcgttacaccccctgttcattatcttattgattcttatcccggtttaaaaccggggtaagatcgtgtctataaaaatatgtgaaatcgatcaaaagatataaaggtatacctttatatcttttgatggttagttacactctcttcatagcctccatagattgtctggtggatggcttatataaaaacgtttttatttcatgtagtgacatcattaattgttcaccagatttgcgctgttaagcgtaaaggaatatcaacatgaaactttctatcgtggaaaaaatcggcttcggcgcgggagatatggcgataaacgttgtgattatcgccatgcagctgctcctcgcctatttctataccgatatctacggcctgagcgccgctgatgttggcgtactgtttgtggttgtgcggatgattgatgccattatcgatccggccatgggggttctgaccgataaactgaatacgcgctggggacgttaccgcccgtggctgctgtggtttgccattccttttggtttcgccgtgtatttgatgtttattacgcctgacatggcttatatggccaagctggcgtgggcctatggcacctatattcttatgaccctggtctataccgcgatcaccattccctatatttcgatgattggcgtgattaccagcgaccccgtcgaacggttaagcgccaacggttatcgctttgtgatgaccaagattgccgcttttctggtgactatcgtcgtaccgatgcttgccgtctggctggggcagggcaacaaggcgctgggttaccagttttcgatggggctgatgggggcgatgggcgccttgctgtttatcttctgttttcttaccacgcgtgaacgcagcgagccggaaattacgtcgttatcggtggggaaacagtttaaatatctgttacgcaacgatcagtggattattctcggcgttgttattctgctgctgatgtgcggttatgttattcgcggttccgttgccgcttattacgctaagtattatctgaacggcggcgatagcctgatttcacccttcctgactaccggcgtcgttgcctctattttagcgatgatcgctaccacctggataaccaagttctgggacaaaattaagatgttccgctacacccagattattacctttatcctgagcgcgctgatgtatttctccgtcgggcgtgaaaaccttgtcctggcgtttgccttctattttcttattaatttcttctgcgatatgcaaatgccggtgttctggtcctctatcgccgaagcggtggattacggagaaaagaaaaccggtctgcgcgtttccgggttggcgtttggcggcatcctcttcttccagaagtttgggatggggatcgcgggcgggatactcggattcctgctgagccactttggctatcaggccgatgttgaacagagcgcgcgttcgctcaccggtattgcgctgatgatgacgctcattccggctctgtttcaccttgcggttgggctgcttatgaaaaagtatctgattaataatgaatattatcgagatattcagcttgccctggcgcagaaacaggcataaggaggcgcaaatgaaggccatgaataaggtttgggttatcggcgatgcctccgttgatctggtgccggaaaaacagaacagctatctgaaatgccccggcggagcgtcggcgaacgtgggggtatgcgttgccaggctgggcggagagtgcggttttattggctgtcttggtgacgatgacgccggccgcttcctgcgccaggtttttcaggataacggcgtggatgtcacgtttctaaggctggatgcggacctgaccagcgcggtgctgatcgtcaacctgacggctgatggggagcgcagctttacctatctggtgcatccgggggctgatacctacgtttcgccgcaggacctgccgccgttcaggcagtacgaatggttttacttcagctcaattggcctcaccgacaggcccgctcgcgaggcgtgccttgagggagcgagacgcatgcgagaagccggtggctacgtgttattcgacgtcaacttacgcagcaaaatgtgggggaatactgatgaaatccctgaactgatcgcccggtccgccgcactggcttctatctgcaaagtctcggcagatgagctgtgccagctcagcggggccagtcactggcaggatgcgcgttattacctgcgcgatcttgggtgtgacaccacgatcatttcgctgggggccgatggcgcgctgttgattaccgccgagggggagttccattttcccgcaccacgcgtcgatgttgtcgataccacgggagccggtgatgcttttgtcggcggactgttgttcaccctttcccgcgcaaattgctgggatcatgccctgctggcggaagccatcagcaatgccaatgcctgcggcgctatggcggtgacggcaaaaggcgcaatgaccgctttaccgtttcctgaccaactcaacacttttctttccagccattcgctggcacaagccatgaccgtgaaataaggagtcatcatgcacgttgatcgaaacaaaatactgggatgcctggtgggcgccgccgccgcggacgcgatgggagccgcgacggaagtacgcacccagcagcaaataaaagactattttggcggctgggtgacgacctttcaaaaaccgccagcggacacgtttggccgctgcaacgaagcggggatgtgcacggatgattttattcaggcgaagtacatcatggatgcgctgctgcgccatcaacgccaggtcagcgacgaggcgatgcgcgaggctttccagcagtggctggattacccgtactacgccaactttaccggcccgacgacgcgtgcggcaatgaaggcaatattcaatgataaccgcgcctctttacagggtgagctggaaggcgagaaacagtcggtacagattattaataagggtaacgcggaggcaacgaacggcgccgccatgaagatttggccagcggcggtgctgcacccgggtgatattgacgcggcgattgaatgcgcgctacagatttgccgctttacccataataacgtgctggcgatgtccggcgcagcggcgatggcggcggcaaccagcgaggcgttaagagcgcagaccaatgcagacagcattattgccgccggtatttacggtgcgcaaaggggctatctgctggcgcaggagcaaggggcgatgatggtcgccgggccttccgttgcccgacgcattgagctggccgtagatatcggtaaacgtcatcgccattgggaaacggcggtggtggaacttgctgatattattggctccgggctgcacgtgagtgaagcggtgccggcggcctttggcctgttcgcgtgttgtccgaattctgccgtagatgctattatctccggcgttaatatcggcaatgatactgatactgtcgccaccatggtcggggcgatttccggcgcattccatggcgtggaggcttttcccgccgattatttaacgactttggatcgtatgaatcatttcgatttggcagaactggccaggcaaatcgcagggtagcgacttcaccctgccggggacggtaaaacgtcccctgctggcgaagacgtgaggtgcgcagcttgcaggttgataaaacgagctttactccgctttataagcaactattttttatcatctgtcagcagatccagaacgggtctttgcctttgggtagccaactaccgacgcaaaaagagattgccagatcctacaacgtctcgctgattgtggttaaacaggcctggagcgaattaatcaatgcgggcattatttcctcccagcgcggaagtggttcggtggtgtgctcggtgccggaaggcgtgagctacgggcacacgtttcgcggtattacccgcgatctccaggacgccagcgtggcgattgagaaccgtattctggaaatcgcgccgcgccgcgcgcgcgacgctcaggcagacggcttgagcctgcccgcacagcatcactatctctatatttcgcgtattcgttgcctgaataaccgcccatttaaccatgagaaaatatatctcgatctcagcttctttcccggcctggaactcacaccgcaggcgctggagcatacgtcgctttattcgttattaaacgtcacaagcgactcggcgatagaaaaagttgaggcgattttaccttccgctgacctgtgcgaaaaattgcaaatcgccgccaataaaccgctgttatccgtcgccagacagacgtttcaggccgggaaggacagcccttttgagtattgccgctattacgtgctgtctgaatactttggtgaaattcattatcactgatctgtccacttaatcctgcgataaccccaccatatctggcgtttacctgcctgactgtccgtcgtattcttgctgaaaaaatcgtcaggagacaggtatgtcgctctggttgtcccatcctctgttcctcccgtccatcatcgttggcgttactatccttctgtgggcgacttcgccactgccggagtttatgaccgcactgctattttttgctgtggcgatgggaccagggaaagttcctgcgcgggcggggatgctgtgatgtatcgcgctggcggtgatacgccaaagcgatggctcttttgtcctgctggcgaccgagcgtaatttactgatcttcaatcgcgcttctgccgaggaaattcaggatcatcagtgtgatatcttgaaccaacaggtcatcaaatgacagcttgatattgcattaacgaataccgtttggaggccggacaaggctctcgtggcgctatccggcaaaatctggcgatggcgcgggcgttaccaggccggtggatctgcggggtggctgtcattttccagatgcggcgatttaataaacacgcctttccagggtttatcgccgttattaatgagataatgcgcctccccaggttcgcactgtaaaacatctccagtttgcaggatatgaggtgttccttccagatacaggcacacttcaccgcttagggtataaaaaatctcacaagcggtattatggcgatggttagggaatgactgccctggttgtagtatgacgacgcccatatcgcagcccggcccacggattaagtatttagggccattatcgccaaagcggtattcatgattcttctcattcgttttttgcatgcttattctcctgttacaggcctggcgctttccagagggatgtcgttaagccaccatcgaccagcgcgcgttgatcctgataaacggcctgccatttttctctggcctgctgatagacagcgaaattttcaggattaggtttatgctcccgatcccagcgcactagcttttctcccgtttccgccagcgatggccagacacccacgccaacgcctgcggcaatagcgcaccctagcgcggtagcttctttgacgacaggtacgtgaacggtgagtcccgtaacgtcggcaaggatttggctccataatttgcctttagatcctccgccagcaaaaaccagcgagtcggcctgtacgccggaaaacgcggcaatttgctgtaaattgcaggcggaaacaatggcggcattctcttccagcgcgcgaaatagggtcgctttattacacttttcaggatcgatagacagattgataaacgacggcgcggcatggtaccagcgtttaaaacgcataacgtcagagaagatgggcatcacaccgtacgcgccgggaggcacccggctggccatatcttccagcagggaatacgcatcaatacctaacctttcagcgattagtttttcctcggcgcaaaaggcgtcgcggaaccaacgcatcgttaacccagtaaaaaagctaatagactcggtttgtaccataccggggatcacatgaggattgatgcgaacgttcatgtttgggtcggtgaccggcgcgggaagattgacgacctgttgccagaaggttccgcccagcacggccgtttgcgccgggcgtacgacgcccagccccagacagcctaactgcacatcgccgccgccaacgatgaccggcgtacccgcttgcaggtcgcactgttcagccgctttctgtgaaatgtgaccgagcagcgtcccggtttcttttaccggcgagagaatgtcagaacgcaggcccgccatctgtaacagactacgtttccagttgcgggtcaccagatccaataaccccgtcgtgcctgcgttggagggatcgaccgccagttcgccgctgagcataaaggccatccagtcgctgatcatagtgacggttgacgcgcgatgataaatatccggacgatggtgggcaagccagagcagacgcggaatagcgctgagcgccagcgtttgcccggagcaacgataaacttcctcctcaaaggtgttatcgtgcagctcttttaattcactgacttcgtgcgccgcgcgggcgtcaacattagcgcaggcccaaattggttcgccgttactgtcataaataacaatgccttcacgcatcgagcaggccgatacggcagcgatagccgttgcagggatggcggctttctgtagtgcctgacggatacactggcaagccagttgccagtttttggcaagatcaaactccatcgaaccaggcacatccggcacggccagatgctgccattccgcttgaccgacagctatttgctttccttgtagatcaaaaattactgctctgacgctaccggtaccggcgtcaagagccatcaggtaatgtcctgattcagtatgggtacagagtcgagccatttttttatcctcggctatttttacatcgttacataaaatcctgtcagttattgtttattgaattgaggtaagtgttattttattttttttatttttcaataatttgaattattttccctgcggttttctgatcggtaaccagtgcattgatatagttaccgcgcatagcggcaataatagcttctgctttttgttcgccgccggcgacgccaatcacggttgggatcgtggaaagtgaatttaacttcaggccaattaattcgttatggattttgatgtctggaataatttcgccatgagcatcaaaaaaatagcccagaatatcgcctactgcgcctttgcggccaatcatgagttgttcaccctgagtgatataaccggattttaagatactggcttgatctttctggttaattgccccaatccccacgatggcggcatcggcagcttgcgctgtgagcatcacatcccgcacgctattttcattgcgcagcgtgcaggcaatttcctgcgatgatgcgcgcagcggcgcgggcataatacttacgctacaagcggcatcaagctggcctattccggtcatatacggccccacgccgccggataacgtgaccagtcggatttgttgcgccgagataaatccgctgaggcgttttaatgtggtcatcgtggcttcgccaaagccgacggccagcagttgctgtggccgcagtgactccatcaacatatgggcggcgccgattcctaagcgcagaccaatatcggcatcgggtaatgccggcagcacgcggatattctgcaatgcgaagtggttgcgcaaggcattttcatactcaagacacccttcgaagcgggagttgatttgtacgcgaataataccggactgatgccctttctccagcagacgagaaacctttagccgggttagccccagacgctcgctgatttcactctgcgtcaatccatcgtgatagtagaaccaggcaatacgcgccacctgctcttcttcgcacattccataatcagataccaacgtattatcgctcattgtcataacctggctttactttgaacatttctaaatcattaacacaattgttcagttatcactccgaaataaccgtgattaacgccacaaaaacgcgccaaatctgaacatttatcatctaaaaattcatttattcagaaaacgtgatctggatgagagttttttgaccaaataactactaccgttttgaacaatttctttttcaaaaaacatttgttcagtcccgtcagtcaacattgagggagcggaggcaacatgcaaatcagtcacaatactgcatcccctctgatttgtgtgcagaacatttataaaagttattccggcgtcgaagtactaaagggaattgactttactctgcatgcgggagaggtgcacgcattgcttggcggcaatggtgcgggtaaatcaacattaatgaagattattgccggtatagtcccgccagatggagggactatcgatattgctggtgtgcgttgcagtcatttaacgcctctgaaggcgcaccagtatggcatttacctggttccccaggagcctctgttatttccgagtttatctgtgcgggaaaatatcttgtttggcttgcagggacgtcaggcctccacggaaaaaatgcagcagctattaaaggcgatgggatgccaactcgatccggcgagcgctgcgggtacgcttgatgttgcagaccgccagatcgttgaaattatgcgcggcttgatgcgcgactcgcgaatcttaattcttgatgagcccacggcgtcgttaacgccagccgaaactgatcggttatttacgcgtctgcaagagttgctgaaaaagggtgtcggaattgtatttatttctcataagctaccagaaattagacagttagctcactgcgttagcgtgatgcgtgacggtaaaatcgcattattcggaaaaacgcatgacctttctaccgacgagattattcaagctatcaccccggcaacgcagggcgtcagtctttccgcgaatcaaaagttgtggctggaattgcctggcagccgcccgcagaacgaacgcggcgcgacagtattagcgctggagtcactgacgggcgaaggttttatgaatatcaaccttgaggtgcgggcaggcgaaatccttggtctggccgggttggtcggcgcgggacgcacagaactggctgaaacgctgtacggtattagaccggtcaatgcggggcggatgctgttcaatggtcaagaaattaacgccctgacaacccaacagcggttgcagctcggcctggtctatttgccggaagatcggcagtcatccgggctgtatcttgacgcttccctggcatggaatgtctgttcgctgacccacaaccaaaaaggattttggataaagccccagcgggataacgccacccttgaacgttaccaccgcgcgttaaatatcaaactcaataatgccgaacaggcggcgcgtactttatccggcggtaaccagcaaaaagtattgattgccaaatgcctggaggcctctccgcaattactgattgtcgatgaaccgacccgcggtgtcgatgtctccgcccgcagcgatatttatcagctgttgcgcagtatcgcgcaacaaaatgtcgcggtgctatttatttcctccgatctggaagagatagagcagatggccgatcgcgtatatgtcatgcaccagggggaactgggggggcctgcgttatgcggcgaggaaattaacgttgataccatcatgcacgttgcgtttggcgaacatggtgcgtcggaggcaacatgttgaaattcatccaaaataaccgggaagcgacggcactgctggcaatagtctgtttattcgtgtttcctggcgcgctggatagtcagtatttgagcgtgcaaacgctgacaatggttttcagtagcgcgcaaattttgatgctgttggcgattggcgcgacgatggtaatgctcacccgcaatattgatgtatcggtgggctcgacgacaggaatgtgcgcggtattgctgggagtgatgttaaacgccggctatagcctgccggtcgcctgcctggccacactaatattaggaattgtcgccggattttttaatggcgtactggttgcctggttgaagatacccgccattgtcgccactctgggaacgctgggcttgtatcgtgggatcatgctgctatggacaggggggaaatggattgaaggattacccgcaggcttaaagcaactctctgctccggtgtttctgggaatttccgcaatcggctggtttaccctggtgttagcgctgcttatggcctggctcctggcgaaaaccgcctttggccgcaatttttacgccaccggcgataacctgcagggcgcccggcaattgggtgtccgtaccgagatggtacgcatcatggcattttcacttaatggcggtatggcggcattggctggaatcgtgtttgcctcgcagattggcttcattcccaatcaaaccggcacggggctggaaatgaaagccatcgcggcctgcgtattggggggaattagcctgttaggcgggtcaggcacggtcatcggcgctattctcggcgcttattttcttacgcaaatcgatagtgtgttagtgctgctgcgtatccccgcctggtggaacgattttattgctggcctggtattgttgggcgtactggtattcgatgggcggctgcgttgcgcattacaacgcaatctgcgccgccagaaatatgcccgttttatatcaccacccactccactacagacggaagcaaaaacgcacgcacaacagaataaaaacaaagaggtggcatgatgaatccatggcgacgctatagctgggaaattgcgctggcagccttattgatctttgaaattctggctttcggtctgattaatccacgtttattagatattaatgtcttactttttagcactagcgattttatttgtatcggtattgtcgctttgccgctaacaatggttattgtcagcggtggtatggatatttcatttggttctacaatcgggctatgcgcgattaccctgggtgtgctgtttcagctcggtatgccgctacctttagcgattattattaccctactacttggcgcaatatgtgggctgataaatgccggacttattatttataccggcgtaaacccgttggtgattaccctgggaaccatgtatttatttggtggtagcgcattattgttatctggtatggctggcgccacgggttatgaaggtattggtggatttcccacagcgttcactgactttgccaatatttcatttcttggtattcccatgccgcttattttttttcttgtgtgctgtctgtttttctggctgctcatgcatcgtacgcatatgggacgcaacgttttcctgattggccagagcgcccgtgtcgcgcagtacagcgcgatcccggtgaatcgcacgttgtataccgtgtatgccatgaccggatgcgcctccgcgatcgccgccgtattactggtttcttactttggctccgcacgttcggatctgggcgcctctttcctgatgccggccattacggcggttgtgctgggaggcgccaatatttatggcggctccgggtcgattatggggtccgcgttggcggcgctgctggtgggatttttacagcaggggctacagatggccggagtgccgaatcaaatttccagcgcattgtccggtgcgcttctcattgttgttgtcgttggtcgttccgtcagtttgcatcgtcaccaaatccttgaatggtactcacgccgtcgcaatgcgcatcaggcatgatttccttttgaaatttatggagaaaaaaatggcaagacacagcattaaaatgatcgccttactcactgcgtttggtctggcatctgcggcaatgaccgtgcaggcggcagagcggattgcttttattcccaaactggttggcgtgggcttttttaccagcggcggcaatggcgcgcaggaagcgggaaaagcgctgggcattgacgtaacttacgatggccctacagagcccagcgtctcaggccaggttcaactggtgaataactttgtcaatcaggggtatgacgccattatcgtttctgccgtttcgcctgatggcctgtgcccggcgttgaagcgggcaatgcaaagaggcgtgaaaatattaacctgggattccgataccaagccggagtgccgttcttactatatcaatcaagggacgccaaaacagctcggcagcatgctggtagagatggccgctcatcaggtggacaaagagaaagcgaaagtcgctttcttctattccagcccaacggtgaccgaccagaaccagtgggtgaaagaagctaaagccaaaattagccaggaacatccggggtgggagatagtcactacccagtttggctataacgatgccacgaaatcgctccagacggcggaaggtatcatcaaagcgtatcccgatctggatgccatcatcgcgcctgacgctaacgctttacctgctgcggcacaggcggcggagaaccttaaacgcaataatctcgcgattgttggttttagtacgccgaatgtaatgcgcccttatgttcagcgcggcactgttaaagagtttggcctgtgggatgtcgtccaacagggaaaaatttccgtatatgtcgccaatgcgttgctgaaaaatatgccaatgaatgtcggtgattcactggatattcccggcatcggcaaagtcaccgtttcacctaatagtgagcagggatatcactatgaggcaaaaggtaacggcattgtgttattgccggagcgtgtcattttcaacaaagacaatatcgacaaatatgatttctgataactgttatgtatcgacggagtaaagaatggctgatttagatgatattaaagatggcaaagattttcacaccgataaaccacaaactaacactttgttcgcattaaaaggctgtggcgcgctggattggggaatgcagtccagactggcgaggatttttaatcccaagaccagaaaaacggtcatgctggcctttgaccatggatatttccaggggccgacaaccggacttgagcgtattgatatcaatattgcgccgctctttgaatatgctgatgtcttaatgtgtactcgcggcatattacgcagtgtggtacctccggcaatcaataaaccagtcgttttacgcgcgtccggggcgaattctattctcactgaattaagcaatgaggcggttgcggtggcgatggatgacgctgtgcggttgaatagctgtgctgctgccgcacaggtttatattggtagtgagcatgaacatcagtcgattaaaaatattattcaactgattgatgccgggttacgcgtcgggatgccaataatggcagtgaccggggtgggtaaagatatggctcgcgaccagcgttatttttcactggcaacgcgtatcgctgcggaaatgggggcgcaaattatcaaaacgtattatgtcgataaaggttttgagcgtattgcggcaggttgtccggtgccgattgtcatcgccggcggtaaaaaactgcctgaacgtgaagcattggaaatgtgctatcaggcgattgaccagggggcttctggcgtagatatggggcgtaatatattccagtcagaagatccggtagccatgattaaagcggtacatgctgtcgttcatcataacgaaacagcagagcgtgcttatgagctgtttttgagtgagaaaagttaaatgagatcgcttccccatcttttaccgatgcgaggagatggggatgactgttattttatttggaataatcagggggttaatgatgcacgttacgctggttgaaattaacgttcatgatgacaaggttgaacaatttatcgatgtttttcggcagaatcatctgggctcaattaaagagccgggtaacttgcgttttgatgttctgcaggatccgcaggtgcttacgcgattttatatttatgaagcctacgttgatgaacaggccgtcgcttttcacaagacaacgccacactacaaaacttgcgtggagcagcttgaaccgttgatgaccggtccgcggacaaaaaaagtttttatgggtttgatgccttaaggagcgctcatgaacagccagtttgccggattaacgcgcgaagcatgtgtggcattgttagcgtcatatccgcttagtgtgggtattctggcagggcagtggattgcgttgcatcgctatctgcaacagttggaagcgctaaaccagccgctgttgcatttggatttgatggatggtcaattttgcccgcagtttaccgttgggccatgggcagttgggcaactgccgcaaacctttatcaaagatgttcatttgatggtagcggatcaatggacggcggcgcaagcctgcgtgaaggcgggcgcacactgcatcacgcttcaggctgaaggcgatattcatctgcatcatacgctaagctggcttggtcagcagaccgtgcccgttattggcggtgaaatgccggtgatccggggattagtttatgcccggcaacgcctctggatgtcattatccccattctgagcgacgttgaggttattcaactactggcagtaaaccctggatacggcagtaaaatgcgctccagtgatttgcacgagcgcgtggcgcagcttctctgtctacttggtgataaacgcgaaggtaaaattatcgttattgatgggtcgttaacgcaggatcagttgccttcgctgattgcacagggcatcgatcgtgttgtttctggtagtgcgttatttcgtgatgatcggctggttgagaatacgcggagctggagggcgatgtttaaggttgccggggatactactttcttaccctccacagcataaatgccggatggcggctttaccttatcaggcctacataagcactcggctggtaggcctgataagcgcagcgccatcagacattgattggcaattaagcctgtttagcagcttctgctgctttcacgatcaccgcgaaggcgtcagctttcagagaagcgccgcctaccagtgcgccgtcgatgtccggctgcgcgaacagttcggcggcgttggaggcattaacagaaccgccgtactggataataacctgttcagcgattttcgcgtcagctttagcaatgtggtcacggatgaatttgtgcactgcctgcgcctgcgcaggagttgcagatttaccggtaccgatcgcccatacgggttcgtaagcgataaccgcgccttcaaaggctgccgcgccctgcgttttcagtaccgcgtcgatctggcgtgcgcatacttcttctgttttgcccgcttcgttttccgcttcggtttcaccgatgcacagtaccggcgtcagaccttgttctttcagtacggcgaattttttggcgatcagctcgtcagattctttgtgataagtacgacgctcggagtggccgataataatgtactgcgcgccgatatccttcagcatttcagccgaagtttcaccggtgaatgcgccagacagattcagatcaacgttctgcgcgcccagcatgatgtggctgccggcagcagcgcgtttcgccagatcgatatacatttccggcggagcgattgccacgtcgcagcctgctacgcccgtcagttctttacgcaggttagccaccagttcgtttaccatgtggcggctgccgttcagtttccagttacccatcactaaaggatgtcgcatttcatttctccacgcttagtcagcgaattaaggaagatggccgctcgtcagagcagcatggtctgtgaaacagtatagagattcatccccggaaaggctttgctttttgtcatcaattcgccccttccagattttcagataacgtcagcttaatcggttcaaccgcgaaggtcagccccttttcgccgttatctgcgacaacataacgtaccgcgccttcggtctcggcgtaatagtgtttacctttaccggcgataagcatcttttgcagttttttctggctttgctcttttgtcagtaacggggcgacagtgcgaataatggcggccatatattccagcgctttcgctttcgccgctttctgttccggcccctgaatgggcagccaggtaatctgcatacttttcactttgagcgtaccgcgctccagcgccgtggaggcatacagattttcgttaatcttactggcggcgcgggtcagattcgccttatcgcggctattctcaatggcgcgaaattcattgagcggcagatcgggattctggcggttaaagttctcacgaaactggctaatagaaagatcaaaggttggcgagcccgccagcagatagggcgctgtcgtggtcgatgaagagagctgcgcgtgcgccgttatgctggcggtgagagcagaaaacaacagtaaaaacagagtacatcctggcttcatcaatcttacctttcgttaggactgctcacgattaaaacgataactgtcgggcttgtcaaaagggtaaactgtagcggaaggcaaaatataaggaacttacatgaccatacagcaatggttattctcatttaaagggcgtatcggacgccgtgatttctggatttggatcggcctctggtttgccgggatgctggcgctattttcgctggcggggaaaaacctgcttgatatccaaacggcggcattttgcctggtgtgcctgctgtggccgaccgccgccgtcatggtcaaacgtctgcatgaccggggacgttccggcgcgtgggcgttgctgatgattctggcgtggatgctgctggccggaaactgggtgatgctgccggggatgtggcagtgggtcgtcgggcgatttattccgacgctgatcctggtgatgatgcttatcgatctgggcgcgtttgtcggtgttcagggggaaaataagtttgggaaagcgacacaggacgtgaagtttaaagcagaaccgtaaacgggcggtaaaccgtaatttgcccggtggcgctgacgcttaccgggcctacagattggtgatgatttgcaggccggataagccccagccgccattcggtaaaacatcaccagtaatgttcagccgtcatatgccccggtcggcggcgcagatgtttagtcatctgtcgggtctctttcagcagttgctgcgtatcgcgcaccatctgcgggttcccgcacagcataacgtggctggtctctttatccatcggcaatccaacggctttttccagctcgccgttttcaatgagcgctggcacgcgtccagtaagcgagcctggcacgttctcccggctgaccaccgtttggatgcgcagcttgccttcataacgctgttgcagttccagcattagcggcagatagcttaaatcggcggcgaagcgtgcggcgtggactaagaccagatttttaaagcgtgcgacatcctggccatattgtagaatagacaaatacgggccaatagcggttccggtcgccagcatccatagcgtctcgcagtcaggcacttcatccagtacaaagaaacccgacgcgtcgctgaccacttgcacctcatcgccaggttttagcgccgccagccgcgggctgagctttccttgcggcaccgtcaccagataaaactctaaattcggattgtcaggcgcattgacataggaatacgcgcgctgaacgcgctcgccatcgatctccagtccgagtttggtaaattggcctgcagtaaaaggattaatgggggcgtgaacggtcaggctgaacagtgcgtcagtccagttttgcaccttagtgactttacctgttacccaatcggccatggttttctcctgttctgaatcgctaaccttatcttcgttcgtcaggagaaagatttccagccccgcgaggctggaaggctctaactaacaaatgcgctagagaatatgcgcctgcacatccggatctttacgatcaagatagtggatagactgaatgcggcggatggtgcgtgatttgccgcggatcagcagcgtttccgtcgtggcaatatggcctttccggctaattccttccagtagatcgcctttcgtgatgccggtcgcggagaaaataacgttatcgctacgcgccatgtcgcccaggcataacgccttgcccgcttcaatgcccattgctttgcagcgcgccagttcctgttcgccaatgcggcggttttcttcgctgttgcctttcacgtcatggcgcgccagcagacgcccctgcatatcgccgtccagcgcgcggatcaccgctgcggataccacgccttctggtgcgccgccaatcccgtacagcacgtcgacttcgctatccggcatacaggtcagaatggaggccgcgacgtcgccgtcaggaatggcaaacacgcgtacgcccagtttggccatctctgcgatgacctcgtcatgacgcggttttgccagaatggtcacggtcaaatcgccaagcggtttacccagcgcatccgcgatgttgcgcaggttatccgccagcggcagattgagatcaattgcccctttggcgcccggaccgacaatcagtttttccatatacatatcgggcgcattcaggaaacagcctttatcgccgaccgccagcaccgccagcgcgttcgcctgacccatcgccgtcatgcgcgtgccctcaatcggatcgacggcgatatctaccgcatcgccgtggccggtaccgactttctcgccgatatagagcatcggggcttcgtcgatttcgccttcgccaatcacgatggtgccgtcaatgttgacctggttgagcatgatacgcatggcgttgaccgccgcgccgtccgcggtatttttatcgccgcgtcccagccatttgtagccagccagcgccgccgcttcggtcacacgggaaaattcgatggcaagttctcgtctcataacaaactcgtagcaaaaaggagtggcgcgcagtgtagcacaggggaaggagggaataattgatgtgtgtgcggagttgcctccgcacaaagattttgccggatggcgaccttacttgtcgtgctcttcccacgccattgcgcgtttaaccgctttcttccagccgctgtaacggtagttacgctcggtggtttcaatgccggggcggaattctcgctcaatgacggctttttcctgcagctcgtccaggttctgccagtaaccgacggccaggccagccagataggcggcgcccagcgcggtcacttcgcgcacttccgggcgttccacccgcgtgccgagaatatctgactggaactgcatcaggaagttgttggccactgcgccgccgtccacacgcagagcgtgcaggcggataccggagtcggcctgcatcgcttccagtacgtcgcgggtctggtaagcgatggattcgagcgtcgcgcggataatgtgattagagttcacgccgcgggtcaggccaaaaatggcgccgcgggcatacgggtcccagtacggcgcgcccagaccggtgaaggccggaaccacgtagacaccgttggtatctttcactttcgtggcgaaatattcggagtcgaacgcgtcgctgatgagcttcatttcatcacgcagccattgaatggacgctcccgccataaacaccgcgccttccagcgcatagttgacttcgccgcttgggccgcaggcgatggtggtcagcaggccgttttccgattttaccgctttctcgccggtgttcatcagcataaagcagccggtgccgtaggtattctttgccattccttcctttacgcacagttgaccgaataacgcggcctgctgatccccggcaatcccggcgataggaatacgtgtaccgcctttaccgccaatattggtctggccgtagacttcggaggacttacgtacctggggcagcatcgcgcgtgggatatccagcacgtccagcatcttatcgtcccagtccaaatcatggatgttgaacagcatggttcgtgaggcgttggtgtaatccgtaacgtggacgcggccctgcgtcatcttccagataagccaggtatccaccgtaccgaacagcagctcgccacgcttcgcgcgttcgcgcgaaccttccacatggtcaaggatccatttcactttagtgccagagaagtacgggtcgacgaccagaccggtattgtcgcggatgtaatcttccaggccgtcgcgtttaagctgttcgcaaatatcggcggtacgacggcactgccagacaatagcgttgtatatcggtttgccggtttcacgttcccagacgatcgcggtttcacgttggttggtgataccgatagcggcaatctgatcggaactgatatcggccttagccagcacttctaccagcgttgagctttgggacgcccaaatttccatcgggtcgtgttctacccagcctggcttaggataaatttgctcaaattcacgctgtgatacgctgacgatattcgcgtcatgatccataacgaccgcgcgggagctggtggtaccctggtcgagcgcaacgatatattttttttcagtcataattttgtcccgtaatcagattacagcgaagcattttgttgtgtggtcgcggtggagtccttctcttccacgacgcaggtatcgcacggcaaatgacggccaataaatttgcgataagcaaacgcgcccagaatggcgccgacgatggggccaaacagcggcaccaggaagtaaggaatgtctctaccgccggtaaacgcaatttcaccccagccggcaagcccggcgaacattttggggccaaagtcacgcgccggattcatcgcaaacccggtcaacggccccatagaggcaccgataacggcgatcagtaaaccaatgagcagtggcgcaagcggaccgcgaggtacgccgtttccgtcgtcggtcagcgccagaatcagccccatcagaatagcggtaatcaccatttcaaccgcgaaggcctgcacaaaattgatatgaggattcgggtaagttgagaaaatgcctgcgagatcgagactttcaacgctgccacggacgatatggtgggtttgttcgaagtccacaaaaagattgtaataaagcccgtaaactaacgccgctgcgcaaaaggcgccggcaacttgagaaataataaaaggaacaactttacgtttgtcgaaacaggcaaatagccagagtgcgatggtcactgccgggttcaggtgtgcgccagaaacacctgccgtcaggtagatagccatcgctacccccagaccccagatgacgctgatttcccactgtccaaaagtagctccggcaactttaagcgcagcgacacaacccacaccgaaaaaaatcaacaacccggtaccgaggaattcagcaatgcactggccttttaaggttgatgtttgactcataatcggatcctgaagagtatgtaatgattattggtatgcgaggaggtcatggacatccacgatgccctgtaggcacactgttaatttatcgttaacgagcaaaaacgagaaatatcgaaatcaaaatgtgtgtactgcgtcaataaaatgagcgttatcgcgccatgaagcgcattttgagacagcagaagagagtgaattgaatcatttcattaaccaatatgttaacacttttaagttattgaatgaatgttaccaggagatggatgaaaattgctgcaaaccgcgatctacgcggtatgtcgctggacagcgagagcggggcttcatacaatcgacactatatattgtgcgcgtttacgtgaagcgtcgccttgcaattcaggagaggtaagatcatgtctttagaagtgtttgagaaactggaagcaaaagtacagcaggcgattgacaccatcaccctgttacagatggaaattgaagagctgaaagaaaagaacaacagcctgacgcaggaagtgcagtctgcacagcatcagcgtgaagaactcgagcgtgaaaataattctctgaaggaacagcagagcggctggcaggaacgtttgcaggcgctgcttggtcgtatggaagaagtctaatcctcgtcatatttcacgttatggcggcgttggctgcgtgcgttcaccccagtcacatagtggcctatgctcctggggattcacttacttgccgccttgccctgacgcgaaatctatagaggatttagaatgcggataccggtgggccggataaggcgtaagctgccatccggcaatcagcgacaacgcataaaaaaggcgccttacggcgccttttttgatcactcgatatcaagcgggtcttcggaaaggataatcccggtgttgtcggcatagagatgatcgccggagaagaacgtcacgccgccgaaattgacgcgcacatcgctttccccaatgccttcacctgcggcgccaaccggaatggcggcgatcgcctgaatgccgatatccagctcttccagatcgtccacctgacgcaccgcgccatagataaccagcccttcccattcattttgcgtggccagacgcgccagctccgcatcgactaatgcacgacggacagaaccgccgccatcgaccagcagaacccgaccacggccattttgttcgagcagatcgtacagcaacccgttgtcctcgaaacattttaccgtgatgatttgtccgccaaacgacgaccgccctccaaaattagagaacagcggttccacgacgttgacatcttcctgatagatgtcacaaagctcggaagtatcgtatttcataggcttaacgttcagttgctgcgagaatttttagtatatcgcgctaagtatactgttggcaaaatcatcaattgttaattgatatttgtcagttaaacggcccactgacttaagagtatcccaatcacaaataacaggttggttaacaacgcgcctttaacggtacgttcaagcatcgggcgcattgccgcaggctccctttcgcgcattacgtagcgcgcttgtttaatgagcaagggcgcggccagaataaacaaccatccccacggactgtgtagcgagagcagattaaacagcgccagacagagcagcgcgcctagcaacaggcaggcgtgataacgacgcgcgttgacatcgcccagtcgtactacaagggtgtttttgccgttctctctgtcgctattaatatcgcgcaggttattaatattcagcaccgccgtcgccagtaaaccgcaggcggtggccgggagaatcagcgccggaatcagcgtatgcgcctggagataccagctccccatgacacttagccagccaaagaataccaggacagagatatcacccagcccgatatagccgtagggccgattacccacggtgtaggtgatggcggcgataatcgacagcccgcccaaaatcaggaagccgacaaaatcggttaacgtatggcacgcgaccgccaccagcgccagtccggagatacagatcagcacgacggtaatgattaacgcccgcttcatctcctgtcgggtgatgacgcctttttgcatcccccgcagcggcccgatgcgatccggtttatcgctgcctttgacagcgtcgccataatcgttggcgaggttggataaaatttgcaacagcccggcggtgataagggccagcagcgcgaccagaggatcgaaatagccttgccaccatgccagggccgtaccgacgataatcgccgcgaaggcgaggggtaaggttttgggtcgtaagctttccagccaggcctgggtgcggctaatttgttgttgttcagtcatatttagcgccaataaaaatggggcttttcagccccatcaacagtgatgaaaatgcattggacgcgattataagataaaacggcttagatcttcatctgcgaccagcgcatccagatgtttgctcacatattccgcatcaattgtgatgttttggccgtgcagatcgctggcgttataggaaatctcttccatcagacgctccagtacggtatgcagacggcgcgcgccgatgttttcggtggtttcgttaacctgccaggcggcttcggcaatacgtttaataccggaatcggtgaactcgatattgacgccttcagttgccatcagcgctttatactgcacggtgacggaggcgtttggctcggtcaaaatgcgttcgaaatcgctggtggtcagcgcctgaagttcaacgcgaatcggcagacggccctgcagttccgggatcagatcagacggcttcgccacctggaacgcgccagaggcgataaacagaatatgatccgttttgaccatcccgtgtttggtcgaaaccgtgcagccttctaccagcggcagtaagtcgcgctgtacgccttcgcgtgaaacatccgggccggaggtttcgccacgcttacaaattttgtcaatttcatcgataaacacgatgccgtgctgttcaaccgcgtcgatagcgtcctgtttcagctcttccgggttgaccagtttagcagcctcttcttcaaccaacagtttcatcgcgtctttaattttcagcttacgcggtttctgtttctgaccgcccaggttctggaacatagactgcaactggctggtcatctcttccatgcccggaggcgccataatctctacgcccatcggcgcggcggcgaggttaatctcgatctctttatcgtcgagctggccttcgcgcagttttttgcggaacgtttgacgggcggcagaaggctcctgctgctgttcggcctggccccagttattttttgcgggtgggatcagtacgtcgagaatacgttcttccgccaactcttccgcacgatagcggtttttctcgatagcctgtacgcgaaccattttcaccgcggcatcggtcagatcgcggatgatagagtccacttctttcccgacatagcccacttcggtgaatttggtggcttcgactttaatgaacggcgcgttggcgagttttgccagacgacgggcgatttcggttttaccgacgccggtcgggccaatcatcagaatatttttcggcgttacttcgtggcgcagctcttcatcaagctgcatacgacgccagcggttacgcaatgcaatcgccacggaacgctttgcgttatcctggccgataatgtgtttgttcagttcgctgacaatttcgcgtggggtcatttcagacatgagaggtccttacgctttggcggtcaattcttcaatggtgtggaaatggttggtgtaaatgcagatatcgcctgcaatatccaacgccttttcagcaatttcgcgcgcgccgagctcggtattttccaacagagcgcgagcggcagcctgggcataaggaccgccggagccgatagcaattaaatcgttttcaggttgcacgacatcgccgttacccgtgatgatgagcgaggcggtttcatccgcgacggccagcaacgcttccagtttgcgtagcatacggtcggtacgccagtctttcgccagttcaacggcggctttgaccaggtgcccctgatgcatttccagtttacgttcaaacagctcgaacagcgtgaatgcatccgcagtaccgcccgcaaagcccgcaatgaccttgtcgttgtagaggcggcggactttcttcacgttgcctttcattactgtgttacccagtgtggcctgaccatcaccggcgattaccacgtggccgttacggcgtacgcttactattgttgtcacgagcagaccccttggttactaatgctgaattgcggccccgtacggcgtacggggcataatgcaagtatagatgggggagattttgagggtttcaacccccggtggcgagtcgaatgcagtttgtatggcccgccatcttcagacggttaatggtgctgtcggcattttctttacctttcaccggcccgataaccacgcgattccagccgttattggtggtaattttggagtcaaagccttcaaacgccagctgagcgcggacgctttctgcctgctcggcgcctttgaatgaaccacattgcaccatccagcgacgttcatcttttttctctgctgtcgccttcggcgcttcaggcgcgcgcgtaatgggcgcggcttttggcgctgccgcgctggtatgcgccggcgtttgcagcaaatcctgataaggttgctgcgaggccgtctgcttcggcggctgactttggcgcgcgggttgcgccggggcggactgtaccgtgcgcgtttgcggctgttcgtttacccgcggctgcgtacgtggttgctgaacaggctgcgtttgagcccactgctgctgctgcgcctgacgctggcgctgtagcgtttgctggcgttgttctggcgtctgctcgttccacggcacttcgttaagttgcgtcggctgctgacgcatatccgcctgcatctgttccaggagttgacgctgctcgctggtgagctgattcggattcatgacttcgccgccggcggacggttccgttggcgtacgcacgcccggctggcgactttccagctctttgatgtaacgccagcgctcttccggttttggcggaagcccattgccggtgactttctggttttgtagcgtttcggactcttctttcttatggtgagtaatgaagtacagaccgccgataaaggtcacaaggacggctgccgcaatcgcgaccattgccggcgagacggcaggcatgttgctttgcttcttccgtgagttccgtgaggtgctctttttgcgccgcgaaggagccggttggccgcgacgtacataatctcgttgtgccactatcgtttcgctgtatttattcgttcgtcagcccgtcatgttactgaagcggcgggcctttgaccagacaggtgagtcttaaagctatttactttagggtaaagcgcgcgtagaaccgcgaataatcagctcgcaatccattaaacgcgagccgctgctcacattttgcccctgcatctgatcgagcaacaacagcatcgcctcgcgaccaatgtcaaaacgcggctgcgccacggttgtcaacggagggtcgcaaaactcggccagcgcgatattgtcaaagccgataatcgacagatcgtcaggcactttcagaccctggcgcttggcccaggagagggcgcccagcgccattacgtcgctatgacaaaagacggcggtaggcggcaacggttgctcaagcaactgctttaatgcgtttgccccggcttcaaaggtaaagtcgccacgggcgatgtaatgcggatcgaccacaatgccactgcgtcttaatgcctgtacgtaaccttgtaagcgatagtgacagagcggcatatcttccggccccgcaatacaaccaattcgcttgtggcccaaatccaacaggtagttcatggcattgaacgcggcggtgaggttatcaatatgtaccgtcggcagttcaagctccggcgcgaactcattcgacatcaccatcggaggcaaattgcgctgctcctcaacgctggcgtcaaagggcagtcgggaactgagaagtaccatgccgtcgatctgtttggtgatgatgagattaagaaaggttttttctttctggttttgatgggcgcaatcgccaatcagcaccagatacccctgttctgccgcggtcacttcgataccgcggataatttcactgaagaagggatcgcaaatatccgggacaatcaccaaaatcgtacgggattcattgcgttttacatttcgccccatcgactgcgggaaataacccacttcaagcgcggcctgttcaacccggctacgggtcgactgggagactttatcggggttcattaacgcgcgggatacggttgccgtagagactttcgccttcaacgcaacatccttcatcgtagcggcagtaacctgcttgttcgatttcactctttctcctcgcctgggaactgctggcgcagatctatccctggtaacactcatcgaaaacatttttatcagatagtgcgtggaagcggttacagaattttcataaaaagtgtgatggatctttaattttacgatccgcctcgcatcgtgaggactatccttcaatcggatcgacgtccagaacccatttaactttccgcgcttccgggagcgtattgatcaacgccagcgtgccgctgatgatgtgttgcaggcgaatccgtgaaggatgctgaagtaaaatttgccagcgatagcggccgccgcgttttggcgcgagggccggaaccggacctaagatccacagcttatcgtctgatagcgggctggcctgaatcagattacgcaactgttggagaaagacgggcgcctgctgattgttatgatcctctgcgcgaataatgacgtggctggtccacggcggaagctggagcgtttgccgttccgccagcgcctgctccgcaaacgcatcatagcctttatacagtaacgtttgcagcaggggatgctcaggatggtgcgtttggagcaccacttcgccctgtttgcccgcgcgcccggcgcggccggaaacctgagtgtagagctgggcgaagcgttccgccgaacgaaaatctgcggaaaaaagcgcgccatcgacatccagcaacgccaccagcgtgacatccggaaagtgatggcctttcgccagcatttgtgtgcctatcaggatgcgtgctccgccgcggtgaacttccgccagatgctgctccagcgcgcctttacgactggtggtatcacggtcgattcgtgagatcggcacgccggggaagaagggcgccagcacctgctccagctgttccgtccctaacccaaccggtaacatatgtgtggagccgcaggaggggcactgacgcggtaccggacgctggctgtcgcagtgatgacagcgtaaatgatgctgcgcctggtgcagcgtgtagtagtgatcgcaacgcgggcactctgcaatccagccgcagtcgtggcaaagcagcgcgggcgcgaatccccggcggttaagaaataaaattacctgattgtcggcctggagatgttggcgcatacgggcgataagggcgggcgccagtcccgcctgaagacgctggccttttaaatccagcacatgctgcagagctgggcgggcgttgcctgcgcgccgcgtcagacgcagcatccggtattttttctgccgcacgttacatagcgtttccagggctggggtggcggagccgagaataatcgggatctgctcgctatgggcgcgatacactgccaaatcgcgggcgtggtagcgccacccttcctgctgtttataagagctgtcgtgctcttcgtcgatgacaatcacgccaagatttttaaacggcgtaaacagcgaggaacgcgtgccgatgacaatcgccgcttcgccgtttttcgctttcagccatgccgaaagacgctcgctgtcgtttagcccggaatgcagcacttccaccggcgcgttaaaacgttcgcgaaaacgggcgatcgtttgcggcgtcaggccgatttccggcaccatcaccagcgcctgtttgccctgggcgaggacgttttccagcacgctcagatacacttcggtcttgccggaaccggttacgcctgccagcaaccaggcggagaaaccgtccgacgcgctgtgaatcgcgccgactgctgtcgcctgttcggtattcagccgcaggcgctctcctgcgacggcataacgctcccgccagtcggtaaacgcgggcgtttcactggcaagctcacaaagtcccttacgccgcagcgtttgcagcgtggcgtcagtaaaatcaagctcggctacctgatagcgccagatctttccttgccgtagcgccgccagcgcctgttgttgtttggcggagcgtttcaggctgttgatatcgacggcttgcccctcttcggtggcgaaccaataccataggggcgcgttgctggctggttttccctgacgcaataaaaccggcagagcgtgaaacagaacgtcgccgaggggatggtggtagtaatccgccgcccagaggagtaagcgccagatggagggagaaaagattggctcgttatccaggatttcaatgaccgattttaattcatcgagcggcaattcgctgtggtcgctaatcgagacgacaatgcccacgcgctcttgctgcttgccgaatggcacgcgcacgcggcacccggctttggcgaccccgccttccggcagcaggtaatcaaaggttcggggaagcggaacgggcaaggcaacgtgcgcgacggacatagcatcttcctgacttgaaatttcgtcgggtagtatacacattacgataagggagcgcggatcagtttgcatacggtggtcaaattctgtatgattcgccgcctttggtgcgtgttgtgagcatcaaaccctttactattaacttcgcgtggtgtctggcgttagggctggaagagcgacgcggccttacactgaggttccccatgaaaaaaggtattcacccgaattacgtagaaattactgcaacctgttcttgcggtaatgttatcaaaacccactctaccgtgggtcacgacctgaacctggacgtgtgcggcaaatgccacccgttcttcactggtaagcagcgtgttgttgataccggtggtcgtgttgagcgcttcaacaagcgcttcagcatccctggcagcaaataagttaccgccagaaaaaaaagcgccgcagggcgctttttttgttttctagggataacagtatttgttcagacacattctgtgatccgtaatcgctttcattacgcttcctgccgtgagttttaacgaaggatttatagtcagtcccgcactttccagccccttcgctgtccatttattgcaggtattgagtatgccgtagcggccattcgcggcgtaaaactggctatcgccgtaaattccttgttttaacggaatcagattacccccttcgtcacgcgcaaagctgcggcccagatagcgcatcagactgttacgctggtttgtgtgcaggagcagtgattttatctcgctaccgacgaaatagcgttctggttgaccggaaaaggcgacgatgtgcataaccgcgccggatgaccagaacatggcctggagcgtaagcgcggtggttatttcttgtgactgataaaagcccttatcgccccagccgatttcataccactgcgtctcctgagcgaaccgttttttaagctgtggcagaacggtattaacatcatgggccggcgcaataattcccgtgtgccagccatgactgacgatatagatttccgtcggggagggctgtccgcctgtcgtaggttttacggcttgtggaaaggttgtgcagccatatagcaataaacttatccaggcgataaagagatttttcatgacatatcaccagcaaaggcgcggtatattgtggcgtttgtctaatgacgctgcgcttatcgggtcggtgccggattggtaattcattgatatttttgcattcctcttcgagggcaataaggcgaatgtcataactacaatacgttttaaccattcaggcggaagttagcttccgcctgttttacttttactatctcgctttattttttaaacatctgctctggatcgataatcagcgcccgataacccagcataccggcacggttactgtgtacttttagctccagcatcacatcctgagtaccgtctttgacttcatccagaacggaaacgatcggttttgtaccgctcattcccgctgtggccgagtacatgaacatcgttttggtttccgggcgatattccgtgacggaagtaatggcgctgtaccagtcaaaaccgcgctctttaccatattcccacatttgggaaaccgtcatatttttttcgtcaatttgatattccacgccgcgggaatatttcattgatggcatggccggttgttccatgccgcgcgcatcgccgttatcaaaggcggtcacgacggttttacctccggtgcttttggatggcactaaccaaccggtatgttgtgtccatgtccagtcaaatccaccgtcgcagtggtgcgcttcgcaggttagcggtttaccgttgctgtctacgggtttcagcacttttttcgccagttcgcctttccagccggatggatcggaaagtatccatttcacttttttatcgcgaccaattttgatgatggcagactggtggcgcgagctaatgataatgctgtcgtcgcgaggatcgtagctgacggagttaacatgcgcccagttgcggcccgggccggagcccgcgatatcgccgaagggttgttttgcaagctgctctttggtcatgacctgaccggaatgttcggcatcgacgctcaaacataccgctccctgatccatcgccagaataacgtcgtcacgataggggtcgaggatttttggcagatcccagtaatcgacggtatcgccgttctggtcaacttcaagaatatgatcacgcacagtattgatggtgtatttaccatttaatggataattttcttttgcgacacgcagcaggtaggtgcctttcggcgtttcggtaatggcgtgcgaaaaatcaataaatccttttggcagtcgtttatcggaaataacgcggcctaagaaatcatatttaaagtaacgttgaccctggccaaacataagattgccatcgttaacctgatggaagcccatcatggaaccaaagcgcgttatatcatcctggttacggaatttatcaatattcatatagccgcgaacatcgccattcgtatcgctaatccagttgataccggtataatcccagttcgccgcgccgcctgcgacatgcataatgtggccggctcttggcatccccgttatatggttaaaaagatataagcggtttttaagcgagctatcgactttaaccggttctaccgtaggaagaacggcagtttgcccggtagtagagggtaatgataccggtgcggcgtaaatggaccacgtataagtttgttttttaccttcttcagtccagtcaactttaactttattgacataatctggatacaagccaaatacaggtatgccgtcatgggtatttatagcctgcgggccgacatcataactgatcgggatgcctttttcccctttccctaaaacggtaaccttcacgtcctgtacattatgattggctttattaatgattgctgttaatgggaaaacgccgccgtagggagcgacatcgaccatacctaatggcccttcatggactggaatgacatctgctgatgcgaccattggcctgtttgggtctaaaacgcctgaggccaaaacgctgccgctcaaacacaggcagcataatacaggtaagactttccttgtaaataacatatttatttccccattcgatattatcgataaaatgaatgtatattaaccttcttatttatcggagatgaaaaaacatttaaaaaagtaaaacaatccgcggaggggaataatgatgttggtcacaaatatgaggtgtccatagtctttttaacaatactcattgttatactatttgttcagtaaatatatggcgctgtattattattcatatgcgctttgctacgtgaaacattaaataaatattagaagtttaaatataataaaattatatcggttataacatgccgggaattttttccaggaaaataacgaagagaaacttatcatgtctgacaaatttatccaccgagggttattcgggaagatgaacatttagaacaatgtcggagatagccgtgtacaaggggaatcgttaaaaaagcgcggccagaggcgttctgaccgcatgctttgctatcagtattcccacgtttccggatcaatccccaactcacgcatgatctcttttgccgcttccgggatttcatcgctgcgctcttttcgcagatcggcatcatccggcaagggttgcccggtaaaggcgtgcagaaatgcttcacacaacagctcgctgttggtggcgtggcgcaggttgttcacctgacgacgcgtacgttcatcggtgaggatttttaacaccttcagaggaatggaaaccgtaatttttttgacttgctcactcttcttaccgtgctcagcgtatgggctgatatattcgccgctccattcagccatgagatacttaatcctcttcgtcattaatattgaggtctgaacctgagcccggaccataatcgcgcgtagtttaccgtagtggcgcggccctgacacgaagttagcggtcgcagatgtgcgctaatgcatataattttaacggctatttgcggtttgctcaatctatacgcaaagaagtttagatgtccagatgtattgacgtctattgtggtagtggttaatctgtggcctgactttcaccgactcagccaggaatatcttcatatgacgcgtaaacaggccactatcgcagtgcgtagcggattaaacgatgacgaacaatacggctgcgttgtgccgccaatccatctctccagtacctataactttaccggtttcaatgagccgcgcgcgcatgattattcccgccgcggtaatcccacgcgtgatgttgttcagcgcgcattagcggaactggaaggcggcgcgggcgcggtattgacgaataccggcatgtcggcgattcatctggtcaccaccgttttcctcaagccgggcgatctgctggtcgcgccgcatgattgctatggcggcagttatcgtctgtttgacagtctggcgacacgcggctgttatcgtgtgcggtttgtcgatcagggcgatgaacgcgccttacaggcggcgctggaagaaaaaccgaagctggtactggtagaaagtccaagtaatccattgttacgcgtggtggatattgcgaaaatctgtcggctggcgcgcgaggcgggcgcagtgagcgtcgttgataacacgtttttaagcccggcgctgcaaaatccgctggcgttgggtgccgatctggtgttgcattcatgcacgaaatatctcaacggtcattcggatgtcgtggccggcgtggtgattgctaaagatccggaagtggtcactgaactggcgtggtgggcgaataatattggcgtgaccggcggggcgtttgatagctatctgctgctgcgcggtttgcgaactctggtgccgcgtatggagctggcgcagcgcaacgcgcaggcgattgtgaaatatctgcaaacccagccgttggtgaaaaaactgtatcatccgtcgctgccggaaaatcaggggcatgaaattgccgcgcgccagcaaaaaggctttggcgcaatgttgagttttgaactggatggggatgaggagacgctgcgtcgttttctgggcgggctgtcgctgtttacgctggcggaatctttagggggagtggaaagtttgatctctcacgccgccaccatgacgcatgccggtatgtcgccgcaggcgcgtgcctccgccgggatctccgaaacgctactgcgtatctccaccggtattgaagatggcgaagatttaattgccgacctggaaaatggcttccgggctgcaaacaaggggtaaacatgagtgtgattgcgcaggcaggggcgaaaggtcgtcaactgcataaatttggcggcagtagtctggcggatgtgaagtgttacctgcgtgtcgcaggcattatggcggagtattcgcagcctgacgatatgatggtagtgtccgccgcaggcagtaccaccaaccagttgattagctggctcaagttaagccagaccgatcgcctttctgcgcatcaggtattacagacgttacgccgctaccagtgcgatctgattagcgggctgcttcccgccgacgcggcagatgatttaaccagcgcttttattagcgatctggaacgtcttgccgccttgctcgacggcggcgtaacggatgccgtctatgctgagatcgtcggacacggcgaaatttggtcggcgagattgatgtccgccgtcctgaatcagcaggggctggatgccgcctggctggacgcgcgcgcatttttacgcgccgaacgcgccgcacagccgcaggttgatgaagggctatcttatcctttattgcagcagctactggcgcagcatccgggcaaacgtctggtcgtgaccggctttatcagccgcaatcatgacggcgaaacagtcctgttaggccggaacggttccgactattccgccacgcaaatcggcgcgctggcgggcgtttcccgcgtgaccatctggagcgatgtcgcgggcgtttatagcgccgacccgcgcaaagtgaaagatgcctgcctgctgccgttgctgcgtctggacgaagccagcgagctggcgcgtctggcggcgcctgttctgcacgcccgcacgctacagccagtgtccggcagcgatatcgatttgcagttgcgctgtagctacacgccggatcaagggtcaacccgaattgaacgagtgctggcttccgggacgggcgcgcgtatcgtgaccagtcacgatgatatctgtctgattgagtttcaggtgccagccagccaggatttcaggctggcgcataaagagctcgaccacattttaaaacgggcgcaggtgcgtccgctggcggtgggcgtgcatcgcgatcgccagctattgcagttctgctataccgccgaggtagcggatagcgtactgaaactcctcgacgatgtcgggctgccgggcgaattgcgcctgcgacaggggctggcgctggtggcgatggtcggtgcgggcgtcactcgcaatccgctacactgccatcgcttctggcagcagttgaaaggtcagccagtggagtttacctggcagtcggaggagggcatcagtctggtggcggtgctgcgtaccggcccaactgagagcctgattcaggggctgcatcagtctgttttccgcgccgaaaaacgcattggcctgatgctgttcggtaaggggaacatcggctcccgttggctggaactgtttgcccgtgaacaaagcacgctttccgcgcgtactggttttgaatttgtgctggcgggcgtggtggatagccgccgtagcctgttgaattatgaagggctggacgccagccgcgcgttggcattctttgatgatgaagccgttgagcaggacgaagagtcgctattcctgtggatgcgtgcgcatccgtatgatgatttagtggtgctggatgtaaccgccagtgcacagttagccgatcagtaccttgatttcgccagccacggttttcatgtgattagcgccaataaactggcgggcgcaagcgccagcgataagtatcgccagattcatgacgcgtttgaaaaaaccgggcgttactggctgtataacgccaccgtgggcgcgggattgccgatcaaccacacggtgcgggatctgattgacagcggcgatacgattctctcgatcagcgggatcttctccgggacgctatcctggctgttcctgcaatttgacggtacggtgccgttcaccgatctggtggatcaggcctggcagcaggggctgaccgaacccgatccgcgcgtcgatctttccggaaaagatgtcatgcgtaagctggtgattctggcgcgcgaggcgggatacgacatcgagccggatcaggtgcgtgtagaatcgttggtgccggcgcattgtgaagaaggatctatcgatcactttttcgaaaacggcgacgcgctgaatgaacagatggtgcagcgtctggaggcagcccgcgaactggggctggtgttgcgttacgtggcgcgtttcgacgccaatggcaaagcgcgcgtcggcgttgaagcggtgcgtccggaacatccgctggcggcgctgctgccgtgcgataatgtctttgctattgaaagccgctggtatcgcgataacccgctggtgatccgtgggccgggcgcgggtcgcgatgtgaccgccggggcgattcagtcggatatcaaccgtctggcgcagttgctgtaataaaggcaagttcgtgagcgaagcgccgggttgcgcttcgctccctcatcaatacgttatgcagtcattctgtagatactgatatacgaagcgccatccgattgctgacgaaacattatggcgtgatgctttttacattctcaacccggacatccatccgggggtaaggaatattgatgccgttttcatccattgcttccttgatattttccagaagatcgtagtaagtactccagtactgagcgttgggcacccatacgcgaacatagaaattcaggctagagggcgcaagttcgcccaggcggaccgtaatatcgcgggttttatcaatgcgatgatcttgctcaataatacgatgtatcacgttttttacgtcagcaatacggctttggtaatccacgccaataatcagatcaatacgtcgataggggtgtcgtgaatagttgataatattatcagcaataattttaccattcgggatgacaacttctttgctatccgcagtgagcagagtggtggagaaaatatggaccttttctactgtgccgataaccaggccaatttgtacaatttccccggcgcggaaaggacgcagggagacaagcagtacgcctgcggcaaagttggaaagtgacccttgcagcgccaggccaatggctaaacccgccgcgccgataacggcaataattgaggaggtttctataccgacacggccaagagcggctactgccgtgaaagctatcgtgatgtagcgaaccagcgcggagaaaaagtggacaatagtggcatccacttgccgcctgagaagtaatttttccagccccctcgatagtaagcgagctattaacttaccgatgaaaagtagaatgatggcggcaacaacattccagccaaaatgaattaccgagtcactgtgctcggccatccatttgatcgcgcctttaatttttggaaataactcaaaaccttccatgtttatcctctgtcagcagtatccgcggtattagcggtaataaaacggttcatttttgcctggataatcgccgcgccgacgggtggcagcagtaacgcccagaatagtgtccagccggttcgtattccgccatcttcgtttttattcgccagcagagcgcggatttcgtcgctaagcgtcagacacaatatggctgtgccaaacggcataatggctgacagccatcccgcgccacatgcggtcatgagtcggggcgaaggcgccacaaattgcatttcccggtgaattctgaagaaccaataaataatataaaatggaatgaaaaagcccaataatgcgacgacaaggggttctgcgcactcaggtcgctgggttgatgagaaccttttgggcggtgcaatatagaaaagttcttttttgagcggtaatagtagcaaaagcgcgataaccgctaaagtaattacgattattcctatataaggaattgagtatataaatatagacagatagccagcgatgataaatttgaacagtaagcagaggctaaataaaataacaaatgtctgagcactgccgatagcgctgaaaagcagcatggggactaacagcgttatgatccccatacccagattaattaaaaactgcgctatgataagcctgactacgtcagacgggccatttatgcagaaggaacagaccacgccaatgattaacaggagcgcaacaaagtagaaggggtaacaattttttatacggcagacaaaccagctggcaaccatacccaggaggtatcccagttggccgcaaacgagaataacaccaatacgatcggctggaatagacagtgatttactccaaaaataaacaccatacgacgatcccagcgaactgataaaagagagcaccaaaaagaaaaaagtgatcccccagaatcgatagctactcaggagatcggcgcaggtccattttttatctgacattgacggtaaagtaatttccatatttatcccttgttttccatagaaaataagaatgtatagaactatttaaattgataataaatattgattatgtgaataacgtttatagccgatcttaacttaaaacgaagggccattttataaaatagttctattctttttcagcgtataaaagcaggatgtgaggtgattaaatctatagcgccttctgaatgataatctgtgattttttatgcgtggcattacatcattgggttaaatgtgattccattgtgaattatatttttccgtcagaaaatacagaatttgcgtgacgcgtttggcggaatagtgggcgctttgctggaattcaggttgttgccatagccaggtaacaaagcggcgactggccgccagattaacggcgacaccttgttctaagtgggaaccggttaacgaacagaccattttgcggttgtgaccttgcccccagagttgccactgattttgccaccatccctgccatgttttgcctaacagttgccactctgcgcggcaatcgtcatcgtttatctcttcctcaacgaaccacagcgaggagagacgctggcgaaaccgctccgcccatgccgtaatgaccgcgccgcgcaaaaaacactcatgggcaatgatgtgtgtcgcgacatcaggaaagcggtttttcagcacccgaaaatgaccatgcgccgtaatgaccgggcgaagtattgttccttgcgcgttacgtttaagcgccgccgggccatactgaatctcatcgaactgacttcgctgtaaaaattgccgttctttaatggcgatacggtgaataatatcgcccttctcgccctcgggcggcgcaattcctttccagtggtaatgcaaactttttccggcagacagtaacgtgaaattgctggaaaggtgaagaatattgccgcgaacagcatcaaaactgaataaaaagtacaattgctggaaggcattcgctccctgaaacggtacgagcagcggaatactgcaaatctgttccggcgtttcggcgacattcagcgcgtgctgttttggcgtccagactttcttacagtactggcactgaagtcgctgcgttccgccgggattacgtccataacgaatccatgttttttgatagcagtcggggcaaaagtgaccatgctctttggcatattgcgcgatataagcagacgcccagcggcgaaattccccctcgttgaagagcggcggataactgccgcaggctcgacaatgcaatgccggataacccaggcgatagtccggccacacataatccggcgagtcaggcagcccaagattgcgacaaccagcgcttttgcaggcattaatggtgaacagaggcggcatacattttaccaacgattttggcaggtcgttgattctgccttcataaaacggtacgcgggtgtgaggactctcacataaaaaaacctttcagaacgtaacgtagcgaatctttatatgactgaaagggacttatttatgaaagtaaaactgcttgctgccggtattttgttcacgctgccgttctgggcctgcgccaaagatgtcaccattatttacaccaacgatctacacgcccatgtggagccttataaagtaccgtggattgctgacggtaaacgcgatattggcggttgggccaatatcaccacgctggtgaagcaggaaaaagccaaaaataaggcgacgtggttttttgatgccggagattactttaccggaccgtatatcagcagcctgacgaagggtaaagcgattatcgatattttgaataccatgcagtatgacgctgccactatcggtaatcatgagttcgatcatggctgggacaatacattgttgcaactgagccgggcgaaattccctatcgtacagggcaatattttttatgaggacagcagtaaatccttctgggataagccgtacaccattgttgaaaaagatggcgtcaagattggcgtaatcggcttacacggtgtctttgcttttaatgatacggtatccgccgcgacgcgcgtgggcattgaggcacgcgatgaaattaagtggctgcaacgttacattgatgaacttaaaggtaaagtcgatctgaccgtcgcgctgatccacgaaggcaccccggcccgccagtccagcatggggaataccgatgtgcgacgcgcgctggataaagatattcagaccgcaagtcaggtaaaagggctggatattttgattaccggccacgcgcatgtcggtacgccagaaccgattaaagtcggtaatacgctgatcctctcaacggacagcggcggtattgatgtgggtaaactggtgctggattacaaagagaaaccacaccactttacggtgaagaacttcgagctgaagaccatttttgctgatgagtggaagccagatccgcaaacgaaacaggtgatcgacggctggaacaaaaagctcgataaagtcgtgcagcaaacggtggcgcagtcgccggttgagctgacccgcgcgtatggcgaatcgtcgtcgctggggaatctggcggcggatgcgctgctttttacggcggggaaagacacccagttagcgcttactaactctggcggtatccgcaacgaaatcccggctggcgcggtgacgatgggggcggtaatcagtaccttcccgttccctaatgaactggtcacgatggatttaaccggtaaacaattgcgcagcctgatggagcatggcgctggcttaagcaacggcgtattgcaggtgtctaaagggctggagatgaagtatgacagcagcaaacctatcggccagcgggttaccgtgctgacgctcaatggcaagccgattgacgatgctacggtttatcacatcgctaccaacagcttccttgccgacggcggcgatggttttgcggcattcacggaaggccaggcgcggaacacctccggcggctactatgtgtcgaatgcgatagttgattactttaaggcgggcaacaccatcacggatgagcagctcaaaggaatgcgcgttgcggatgtgaagaagtaatttcccctgccgcggcgcgttcagtgtcgcggcgtgacatgaagaaaattcaactttgctgaatattcctcattctttggcgtgatttttcagttgacgtccttctgcttttccgtcatttttacatctggacgtctaaacggatagatgtttacaacacaacaaataataacatgcgattgatgaggtaaggtatgagcttttttcacgccaaccagcgggaagccctgaatcagagcctggcggaagtacagggtcagattaacgtttcgtttgaatttttcccgccgcgcaccagtgaaatggagcaaaccctgtggaactccatcgatcgcctgagcagtctgaaaccgaagtttgtttcggtaacgtatggcgccaactccggggaacgcgaccgcacccatagcgttattaaaggcatcaaagagcgtactgggcttgaggccgcgccgcaccttacctgtattgacgccacgcgcgatgaactgcgcaccatcgcccgcgactactggaataacggtatccgccacattgtcgctttgcgcggcgatttgccgccgggcagcggtaagccggagatgtacgccgccgatctggttggtttgctcaaagaggtggccgatttcgatatttcagtagcggcctatccggaggtacatccggaagcgaaaagcgcgcaggccgatctgcttaatctgaagcgtaaagtggatgctggcgctaaccgcgcgataacccaatttttcttcgatgtggaaagctacctgcgttttcgcgaccgctgtgtttctgccggtatcgacgtagaaattattcccggcattttaccggtgtctaactttaaacaggcaaaaaaatttgccgatatgaccaatgtccgcattccgtcctggatgtcactgatgtttgaggggctggataatgacgcagaaacccgcaagctggtgggcgctaacattgcgatggacatggtgaaaattttaagccgtgaaggagtgaaggatttccacttctacacgttgaatcgtgcggaaatgagttatgccatttgccacacgctgggcgtaagaccgggtttataacctccagctccctgccgggagctttattacaactcatattgatctacatctctgtaactaaaaatataaaaggtattagctatcgaatctgtggattaattcaactatatctatttgctcctggtgtatatcgtaacggtaacactttaaaagggagctgagatatgagcacgaccgacgatacccataacacgttatccactggaaaatgtcctttccatcagggggggcatgaccgaagcgcaggcgcagggactgccagccgcgactggtggccgaaccagcttcgcgtggatcttttgaatcaacattccaaccgttctaacccgctgggtgaagactttgactaccgcaaagagtttagcaagttagactactccgccctgaaaggggatctcaaggcgctgctgaccgattcacaaccgtggtggcccgctgactggggcagctatgtcggtttgtttattcgtatggcctggcatggcgctggcacctaccgttctattgatggtcgtggcggcgcgggtcgtggtcaacagcgttttgcgccgcttaactcctggccggataacgtcagcctggataaggcgcgtcgtttgttgtggccgattaagcagaaatatggccagaaaatttcctgggccgacctgtttattctggcgggtaacgtggcgctggaaaactccggcttccgtaccttcggtttcggcgccgggcgtgaagatgtctgggaaccggatctggatgtgaactggggcgatgaaaaagcctggttgactcaccgacaccctgaagcgctggcaaaagcgccgctgggcgcgaccgagatgggccttatctacgttaacccggaagggccggatcacagcggcgaaccactttctgccgccgccgctattcgcgctacctttggcaatatggggatgaacgacgaagagaccgtggcgttgatcgctggcgggcataccctcggtaaaacccacggcgcggcagcggcatcccatgtaggggccgatccggaagccgcgccgattgaagcgcagggcttaggttgggccagcagctatggtagtggcgttggcgcggatgctatcacctccgggctggaagtggtctggacgcagacgccgacccagtggagcaactatttcttcgagaacctgttcaaatatgagtgggtacaaacccgtagtccggctggcgctatccagtttgaagcggtagacgcgccggacatcatcccggacccgttcgatccgtcgaaaaaacgtaagccaaccatgctggtcaccgacctgacgctgcgttttgatccggagttcgagaagatttcccgtcgtttccttaacgatccgcaggcctttaatgaagcctttgctcgtgcctggttcaaactgacgcacagagatatgggaccaaaagcgcgttacatcggaccggaagtgccgaaagaagatctgatctggcaggacccgttgccgcaaccgctctatcagccaacgcaggaagacattatcaacctgaaagcggcgatcgctgcatccgggctttctattagcgagatggtttcggttgcctgggcatccgcgtctactttccgcggcggcgataagcgtggcggcgctaacggcgcgcgtctggcattagcgcctcagcgcgactgggatgtcaacgccgttgcggctcgcgttctgccggtattagaagagatccagaaaacgacgaataaagcctcgctggccgatattattgtgctggcgggcgtggtcggtatcgagcaggcggccgctgctgcgggtgtcagcatcagcgtaccttttgcgccgggccgggtggatgcgcgtcaggatcagaccgacatcgagatgttctcgctgcttgaaccgattgctgatggattccgtaactatcgtgcgcgtctggatgtgtcgacgaccgaatcgctgttgattgataaagcgcagcagttaacgttgaccgcgccggaaatgacggtactggttggcgggatgcgtgtgctgggaaccaactttgacggcagccagaacggtgtctttaccgacagaccgggcgtgctcagcactgacttcttcgctaatctgctggatatgcgttacgagtggaagcccaccgacgacgctaatgagctgttcgaaggccgggatcgtctgactggcgaggtaaaatacacggcgacccgcgccgatctggtgtttggttccaactccgtactgcgcgcgctggcggaagtttacgcgtgtagcgatgcgcacgagaagtttgtgaaggacttcgtcgcggcatgggtgaaagtgatgaacctggaccgtttcgatctgcaataatctgacaggttaattcgtcagcggctgctattcggtagtcgctgacgttttcctcgtttaatgcgaaaaataacgaaaatgccccgtgactttccagttaaataatacatcttcctcctgtgctcccgcgcctatgttatgcacaaccagcggcaccccttcaggcgtgacgttcagggataccacgccaatatgcgcaaggccgttatccagtcgccaggagacaatatctcccggttgataatcgctatatttatctgtcaccggcaaagctttgttttgacgctggaaccaggtttccagattcggaacgcggcgatggtcgatattgctgtccgggcgtttcagcttccagttattcgggtaggcagagaaatgcgcctgcatgtcttcatgtacccgtttctgtaaatcaacctgctgactgcgcagcgcgcggatgacgacatctgcacatacgccacgctccagcggaagatcgccattcggataatccagacgaacataggcagcatcataaaatagcgtcttacctatttgcgtcccggcactttgggcgattgcagcattagtttgcgcctgaacggttattggtctggtatcagagcgtggcgaatgatgagagatatggctaataaaaaaagcagcaagaataccgataagcgcctgtgcgaatttcatcttcttcgtccgtgaagtgtgtcagtacgtcatttgactttccgcggagagaatggtgcgtgataaaaaagtctatttcaggacaaaatggactgattccaggctatggaatacctgatgatggcgcttcgcttacccggcctggatgattggataacaaggccagataaggtgcctgtgtcgatattcggcaactgaattctgttgggtcagcaagctgaaatactcctgactatcgtcaggagtattgctcagaccttattcccattcctgcaagaagcgttgaccgtactggtcggcgaccagcagcgcggcgtacacttcatccggcgttgcgccgccaggcatgttatgaatagtttcaccttctgcgcaggaggcttccgcgacggtgcgcatcttggccggaatatcctgtttaatatccagttgcgccagcgtaatcggcaggccaacggaatggcacagcgccgcaacggtttcgatttcttcgaccggcgcgttttccagcaccagttgcgtcagcgtaccgaaagcgaccttctcaccgtgataatagtggtgcgcatccggaatcgccgttaaaccgttatgaatcgcgtgcgctgcggccagaccgccgctttcaaaaccgaccccgctcaggtaggtgttggcttcgatgacgcgttccagcgctggcgtgacgacgtgctgttcggcggccaacatggctttttcgccttcttcgatcagcgtgttatagcatagctccgccagcgccagcgcggcctgtgtacacttgccgcccgccattgtggtggcgccgctgcgtgagcaggcgcgcgcttcaaaccaggtcgccagtgcatcgccgataccggctgccagcagacgcgccggcgcgcccgccactatctgcgtatcgacaataaccatattcgggttatgcggcagcagcagataacggtcaaactcaccggcatcggtataaataaccgagagtgcgctgcacggtgcgtcggtagaggcgatggtcggcgcgatagcgaccgggacgttcataaagtgcgccagcgctttggcggtatccagcgttttaccgccgccgatacccagtacggcgccacactgacttttttcggcgacggcgcgcagcctgtcgatctcattttgcgaacattcgccgccaaacggggcgatttctactgacaaaccggcatccgtcaggcttttgcgcagcgtctcttcggcaaatcccagcacgaatttatcgcccacaaccagccagttgttcgccattggttttaaataatcgccaagacgcgcgatgacgtttgcaccctgaatatacttacctggtgactgaataatgcgatccatacatttctctcctacaggttcagattaccaaaagcgtttttccagtcttgctcaaacttctctattgccgactctaccgcaggcgtattgagcatttgttgcgctacatctaaaggaagggtaatcgcctggcaacctgccagtaagcaatccagcgcctgccgcggcgttttaaagctggccgccagtaccatgctgtcgggcgcgtgatgttccagtagcgtttgcagctcctgaaccatacgaatgccatcgccgccctgcgcatcaacgcggttgacgtagggagcgacatattttgcgcccgccagcgccgccagcaggccctgcgatgcgctgtagacggcggtgcccagcgtcacgatgccttcttttttcagcaatttaatcgctgcaagaccttcggcggtcaccggaattttaaccacaatgccggggatggcgttattcagtcgtttggcttcttccaccatccctttcgcgtcgcggctcatggtctgcgcaaataaagtgccttcttcgccgatggcgttttgcagcctgggcagcacatcccagatagattctttgctggctgccacaatgcttggattggtggtgacgccggcaatcgggaaaatgcgcgccagacgttcaacttccgccacgttagcggtatccagatagagttccatagtctttcctttacagttcaagttcatgttgcagcaggctggcgatagcgtcggcggaagcggcgttaaccagcgtgttgcggaattcttcgtgcatgatgcggcgggccaggcgcgagaaaatacgcatatgctggtcgcccgcggcgtgtttgttaagcgtcagcataatgatgaactgcgcctcgtcatctccccagcgtaccggcgcgttcaggcgcgccacgctgatggtggactgttcgatatgttccgatttgctgtgcggaatggcaaagctaaagcccagtccggtggagaataccgcctcgcgcgcccatagatcggcttccagtttgcgcgggtagcggcagcggcccgccagcagcagattgtcggtcatgcctttaatcacctcctctttgctgcgccagtcgctatcaagcgttatgcattgggcggtaaccagcggggcatcctgctgcgacatgcggaactgcgccagcagatgctccacctccagcgaggtgcggcaggccatcgcctgattcaacaactggcggcaggctcggctgtcgagttgtgccatccgcgctttggcggcgggaatcgacggcgcgcccatgctgatctcgtccagccccagacctaccagcaatggcagaaccgaacctttggcccccagttcgccgcacagaccaatccatttgccctgacgatgtaccgcctgcaccgcgaaatccaacgcgcgcaggaaggcgggattcaggctgttgtagtgacgagtgactttggcgttatcacggtctaccgccagcaggtattgtgttagatcgttactaccaatactaaagaaatcaatctcttcacagcattgatcgatgatgaacatcaccgacggcacttccagcataatgccgagtgggatcttctcatcgaacgggatatgttcattacgcagctgctgtttggcttccgccagcttctctttgacccacagaatctcttccatagaggagatcatcgggatcatgattttcaggttgccgtgggcggacgcgcggaggatcgagcgtagctgggtggtaaacagagaagcgtactcttcataaatacggacggcgcgatagccgaggaatgggttggcttcggcaggaatattcagataatcaacgggcttatcgccgcctatatccattgtgcgcacaataatgctgcgtccctttgcggactccagagcctggcaaaaaatattgtacagctcgttttcgtccggcgcgcaggcgcggtccatatacagcatttctgtgcggaacaggccaaccgcttccgcgccgttactaaaggccgcttgcgcctcgacggagtgcgcgatgttggcggcgacctccatgcggatgccgtcagcggtgcgcgcttcctgggtcagccagatgcgctgctgttcgcgcagggcgtcttgcacgcgggcttcctgctgatagtaacgagtgacaggctcgtcaggcgcaacgacaatcgcgcctgcgttgccgtcaatataaaccgtctgctgacgccacggtgttaaggcctcaatctccacgccaaccagggtgggaatgttgaatgagcgggcgagaatcaccgtgtgcgaagtggtgccgccgctttttaacagcagacctttgagaaaggttttatccagttcgaggaactggcttggcgtcaactcttccgccatacagatagatggccgggtcaactggcccggcgccggaaagcgctgcccaccgtaaatgtgttgcagtaactggaagcaaacgtcacgaacatccagcgcgcgttcctgtaaatagctgctgctggcgcgagcgaactcattgcagaaatggttcgcgctttccacgattgcctgcgcgcagcttaaaccgcgcagaacgccgtccagtaaatgctgacgcagtgaagcgtcgcctgccagtgaacgatgggcttccagaatcgcgctggcggcaccgtcactgtcgagctgacgaaactcaatatgctttatcaacatcgctaagccattgtccagcgcggcttgttccgtctctgtgtcgttggcggtcgggagttcgccgagcgcattgagatccagggaagagagtggcgtcagtacgccgcccgcgctgccgctacacacgctacgggcgcggtaaatctgcggattcagctgggtcaacgacgccggaagcggctccagttcgctgtttttaatctccgccagcggcgcgtcgcagagtgggaattcatcgcgcagccattgactcagacgctgacaggcaacctgttcatcggcaccggaaatcaccagctgacagtggtcgccagccagcgtgtcggtgccaatcagcgccagcgcgcttttggcgctgcctttgcgatcggtgcgcaggttgtgccactcaatttgcgacgtgaaggtattacacagcgtttctacgtggcttgccgggcgcgcatgtacgccattcggcagttcacaggtaaattccacaatcaggggcattgcctctctcccataacgattctctcgctacagcataaaaggaggtagccggaatacgccatgtgacaaatctgtcaaaagctggataaatgtaatgtagcgcaaaaagtgcgagttgtctcacaacttagcgtggtagcgcgggttttacctttttcagaagttatgaagcggatcgcatttttatactgatattacaaaaatccagtaaatggcctttttatccactgtctgcgcggcaatggattgcctattgttttccgcagtaactttatggacatgggctttatccagcccgggagcgacttatgaaagagttggtacagatcctgaaaaatacccgccagcacctgatgaccggtgtttcgcatatgatcccctttgtggtggctggcggaattttgctggcagtctccgtcatgctatatggcaagggcgccgtacccgatgccgccaccgatccgaatcttaaaaaactgtttgatatcggtgtcgccgggctgacgctgatggtgcctttcctcgccgcatacatcggttactccattgccgaacgctccgcgctggctccttgcgcaattggtgcctgggtgggtaacagcttcggcgcgggttttttcggggcacttatcgccggacttatcggcgggatcgtggtgcattacttgaagaaaatcccggtgcataaggtgctgcgttctgtgatgcctatttttgtgattcccatcgttggcacttttatcaccgcgggcatcatgatgtgggggctgggcgaaccgatcggtgcgctgacaagcagcctgacccaatggctgcaagggatgcagcagggcagcatcgtgctgctggcggtgatcatggggctgatgctggcttttgatatgggcggcccggttaacaaagtcgcttatgcgttcatgctgatttgcgtggcgcagggcgtatataccgtggtggctatcgccgcggtgagcatctgcgtaccgccactgggactggggctggcgacgctgattggccgcaagaatttttctgttgaagagcgcgaagccggtaaagccgcgctggtcatgggctgcgtgggcgtaacggaaggggcgattcctttcgccgctgccgatccgctgcgcgtgatcccatccattatggtgggctccgcttgcggtgcggtaatggccgcgctgtttggcgcgcagtgttatgccggttggggcggtttaattgttctgccagtcgtggaaggcaagctgggttatgtcgcggcagtcgccgtgggcgcggtggtaacggcagtctgcgttaacgtgctgaaaagcctgacgcgtaagaatgtgtcgcaagttgacgaaaaagaagacgacctggatttagattttgagatgaattaagcgaggaataagccatgactaaaattattgcagtaaccgcgtgtccttctggtgttgcgcatacctatatggcggctgaagcgctggaaagcgcagccaaagcgaaaggttgggatgtaaaagtggagactcagggctcgattgggctggaaaatgaactgacggcagaggatgtggcgagcgccgatatggtgattttgactaaagatatcggcatcaagttcgaagagcggtttgcgggtaaaactatcgttcgcgtcaatatcagcgacgcggtaaaacgcgccgacgccattatgaacaagattgacgcccatctttcgcaaaccgcgtaacgttaaaatgcccgatggcgcaagtttatcgggcctgctcacaggcccgataagagatttatgccgccatccggcgctcgtgtccacaggagctcctcatgacccatcgtattcaacgcctcaaagccgctctgtttcagaatcaccgtgaaatttctctggagcgcgcgctgctttataccgccagccatcagcagacggagggcgaaccggtcattttgcgccgcgccaaagcgacggcgtatatccttgaacatgttgaaatttcgattcgtgacgaggagctgattgccggaaaccgaaccgttaagccgcgcgcgggtattatgtcgccggaaatggacccgtattggctgcttaacgagctggatcggttcccgacgcgtccgcaggaccgttttgatatcagcgaagaggataagcgcctctatcgtgaggttctattcccgtactgggaaaaacggtcgatgaaagattttattaacgggcagatgaccgatgaggtgaaagccgccgtcagcacccagatttttagcattaaccagacggataaagggcaggggcatatcattattgattatccacgcttgctcaataacgggctgggtgaactggcggcgcagatgcgcgcgcgctgcgagcaacagccggaaaacgacttttatcaggccgctctgttgttacttgaggcatcgcaacgccacatcctgcgttatgccgtactggcggaacagcaggcggagcgctgcccggacgctcgtcgtcgtcaggaactgctcaccattgccgccaattcgcggcataacgcgcagcacaaaccacagacgttctggcaagcatgtcagctgttctggtacatgaacattattttgcagtacgagtccaacgccagttcgctgtcgctcgggcgcttcgaccagtacatgctgccgttttatcagacttcgctcactcagggcgacgatccggcgttcctgaaagagttgctcgagtcgctgtgggtgaaatgcaacgatatcgtgctgctgcgttccaccagtagcgcgcgctattttgccggtttcccgacgggttacaccgcgctgctgggcggattgacggaaagcggacgcagcgcggtaaacgtgctctcttttctctgcctggatgcctaccagagcgtgcagttgccgcagccgaatctcggcgtgcgcactaacgcgctgattgatacgccgttcctgctcaagaccgccgagaccattcgcctcggtaccggcattccacagattttcaatgacgaagtggtggttcccgcgttccttaaccgtggcgtgtcgttggaggatgcgcgcgattatgcggtggtgggatgtgttgagctgtcgattccgggcagaacctacgggctgcatgacatcgccatgtttaatctgctgaaagtgatggaaatcagcttgtatgaaaatgagggcaacgacactcttacttatgaggcgttgctggcgcatattcgcgccaaaatcagtcactacattacactaatggtagaaggcagcaatatttgcgatatcggccatcgtgactgggcgccggtgccgctgctctcttcgtttatcagcgactgcctggagaaagggcgagacatcaccgacggcggcgcgcgctataacttttcgggcgtacagggcatcggtatcgccaacctgagtgattcccttcatgcgctcaatgggctggtattcgatcagcagcgcctgagttttgatgcgctgctgtcgatcctgaaaaacaacttcgccacgccagaaggggaaaagatccgcgccaggcttatcaaccgcttcgaaaaatatggcaacgacattgataatgtcgataacatcagcgccgaactgctgcggtattactgcaaagaggtggaaaaataccagaatccgcgcggcggccagtttacgccgggttcatacacggtttccgcgcatgtgccgctgggagcggtggtcggcgcgacaccggacgggcgttttgccggagaacagctggcggatggcggcctgtcgccgatgctcggacaggatatgcaagggccgacggcggtactaaaatcagtaagtaagttggataacacgctgctgtcgaacggtacgttgctgaacgtgaagtttactcctgcgactctggaaggagaggcgggactgcgcaagctggcggatttcctgcgcgcgtttacccagctcaaactgcagcacatccagtttaatgtggtgaatgccgacacattgcgcgaagcgcagctacggcctcaggatttcgctgggctggtggtgcgcgtggcgggctacagcgccttctttgtcgagctgtcgaaggagattcaggatgacattattcgccgcaccgcgcatcagttgtgaggttgtgggggcgcgcgatgaggagaccgcgcgtatcttcaatatccagcgctattcgctgaatgacgggcaggggattcgtacggtggtcttttttaagggctgtccgcatacctgtccgtggtgcgctaatccggaatctatctcgccgcgcattgaaacggtgcgccgggaaaataaatgcctgcgttgcacgccgtgtctgcgggatgccgacgaatgtccttccggcgcgtttgagcgtattgggcgtgatattacgctggatgaactggaacgcgaagtgctgaaagacgacatcttctttcgtacttccggcggcggggtgacgctttctggcggcgaagtgctgatgcaggcgccgttcgccacgcgcttcttacagcgattgcggcgttggggcgttccttgtgctattgaaacggctggcgatacgtcggccagccgtctactgccgttggcaagggcgtgtgatgaggtattgtttgatctgaaaattatggatgcggagcgggcgcgcgaggtgatcaacatgaatctgccgcgcgtactggagaatttacggttactggttagcgagggaatcacggtgatccctcgtttgccgttgattcctggctttacgcttaacgcagagaatctgcagtgcgcgttaacattgttgagatcattaggaataaagcaggttcacctgctaccgtttcatcagtacggcgagccgaaataccggctgcttggaaaatcatggatgatgaaagatattcccgcgccgtcggtgcaagagatcgctctgtttcgggagatggcggagcaagcaggatttcaggtcaccacaggaggttaatatggcagtacctgtacggcatctggtggcagtgaccgcctgcgtgagcggtgtagcgcatacctatatggctgctgaacggctggaaaaactttgccagcaggagaagtggagcatcaagattgaaacccagggggcactcggtacagagaaccgcttaacggaagaggatatccgccgtgccgatgtcgtgttgctcattaccgatatcgagctggcgggcgtggagcgatttacccggagtcgctatgtccagtcggggatcagcgcttttttgcgggagccacagcgggtaatgagcgctgtgcgtaaactcctttccgcgccgcaacatacccaccttatcctggagtaatctgcttttccgttagctggctgtgatactggcggcgatactccgacggcgagcgttccgtatttttgcgaaacaggcggcagaaatagttactgtcgacaaagccgcagcggtgcgccacctctttcactttcaggtcataacccttcagcaacgttttggcgtgttccagtcgcgtatggttcaggtattcgttaaagccgatggcccccgttttctggaacaggtgcgagaggtaatttggcgagatataaaacgcctgtgctaccgattcgcgcgtcaacggcgcggcgtagcgttcatcaatatactcccgaatggcttcaaaaagcgcgcggctgcgggaggcggtctggatttggctgccgagcagatcgcggcaatggcttagtaggctggcgacaatcaatctggccgtttgctgctcttgcggctgcatctgcatctcattaagcgtttgtaacaggaacgagccgatacgcgggccgcggcgcgcaacgtgctgtttcgtgaggttttgatgctgctgaccatcccagtggactacgctgaaacctaactgctgtttgccaaacagaatgctcagggtggtgacgggcgtttgccattgcgggatgttccagccgccagccggaacgtagagaacatcgcaaggaatgagcggggcggtaatgctcatgtcagtaagctcgccctccagcacaatctccagccgcggaaaatccacctggtacgccagttccggcgctgggccgctggcgctggcaaaataaatctggcgcagcggcagcgggccgttgatgagacgggagagaaggtggctgacgtcgtgatacatgataatcccctgccgatcgcaaacagaggaaacagtaacgtcgaaaaccgatgtcctcaagcgattattgccggatagcggcgctttgcgccttatccggactacgggagagaagcacgccaggcccgataagcgttagcgttatcgggcaacatacaggctattgattaccgacctgatcgccatacggcaacgtatcataatcaatcagcgcgtttttcttatacgggttgccaatccagcgcgtggtctctttgaactgcgggttggtgatggaacgcgtcgggtcgtagccatcataggtcaggcccgctaagtccgaccaggtatggataagctcggaactgctgtacttacgatcgacatcctgtgagaagtcgcgcggatgcgctgcctgccatttctctgaggtccacagcaggaacggcaccgtatacatatgacgggttggcgaatcttcgtttcgtccctgcgtcttatgcggcggcgtgtcatacacttcttcaccgtgatcggagaagtagagcaggaaaccgttcggatcggtcgctttatagtccttaatcaggctggcgacaacatagtcgttatacaggttcgcgttgtcgtaatcattatacgattccagctcgtcactgcttaatcccggcggaacatggtcggttttaccatcaaacttgccctggttttctggatagcggaacttgtatttaatatgcgttcccagcagatgcacaataatgaattttttcggcgccgggtcggctaacaccgctttaaacggcgccagcacgttgctgtcatattcgcgcgcgctttgagtgcgctgctggttcatatagaactgcttatcagtctgcttggagaacacggtcagcatggtattacgcgccgtcatcgtctgctggttagtgatccagaaggttttatacccggcctgtttcatcatattcatcagcgatggcttcgtcagataccagtccgggttcttttcgtccgcgaacgttagcgcctgttgcaggatctcaatggtgtacggtcgcgaagttaccacgttattaaacacggtcagcccggggtcggttttatgcagcgcgtccagttccggcgtggtttcgcgcggataaccgtacagactcatacggccacgctgggtcgattcgccaatcaccagtaccagcgtgcgcggcgcatcgccggagtggtcctggaagttagccagcggcggcagggcatcgttttcattcagcagtttattcagcgaggcgagctgtaaacggtactgatagtagccagtaataaattgccacggcgcggcgggttccattcgtgatgccaggctatccagcgttttctccatcgacttatgcttgataaaggtattcatcgcgatgggatggaggatcagcccgtacagcagggcaaacgacaccagataacgccagggggatggaatataaaccgggcgcagacgtgtccacagcaaaatcgccgccaccgtataagccagcgcgacaagaacaattttcagactgaaatattggcttaaatattcgctggcttcattggcgttggtttcaaacatcacaaacagcacgctttgcgagaactcctgcccgtagattacgtaatagctcagcgccgccagcgaggcggcccagagtacgacgccaataacggcagcaataacccggatgcggcctggaaacagaaagaccgggatcagccacagtgagctgtacagtagcgaatcccgcagaccgtttgtcccgctgtatccggtgagataaataatggcctgcaggagggtggaaaagaaccaaaagtagagcagtgcccagcccagggctttccagctaaacgcgggtttagtctggagtaatgtggattgcataatgagagcctgtctttaatcgtagcgccaaacgtaacgcctgaaccttaaaagaatctgaagcaaacctgctttatgccgcacgttttgctaagaaagatttacaaatgcataaaatgcagacagaaatatattgaaaaaatgacgaggatgacagcagtatttcatgccgcccccacataactgcgtgagagcggctctcttttggcgttagccggtgttgcgcataccggcagcgacgcccgcaatcgtgaccatcaacgcctgttcgacgcgaggatcgggcgatttgccctgctcttcagtcagacgggaacgatacagcaattcggcctgcaacacgtttaatggatcggtataaacgtttcttaactgaatggactccgcaatccacggtaagtcggccatcaggtgcgaatcgttggcaatcgccagcaccactttaatgtcttcttccagtaggtctcgtagctctttgcccagcggccaaagcgttttcgccaccaggcgctgatcgtaatagtcggccagccacaggtcggctttcgagaacaccatttccagcatcccaagacgcgtggagaagaacggccagtcgcggcacatggcttccagttcgctttgtttaccgtcttccaccactttttgcagcgcagtacccgcgcccagccaggctggcagcatcaggcggttttgcgtccaggcgaagatccacggaatcgcgcgcagcgattcgacgccgccagttggacgacgtttcgccggacgtgagccgagcggcaatttgcccaactcttgctccggcgtcgcggagcggaagtacggtacaaagtctttattttcgcgcacgtagccgcggtaggtttcacaggagatgacggaaagctcatccataatatgacgccagctgtctttcggttccggcggcggcagcaggtttgcttccagaattgcgctggtgtagagcgagaggctgctgacggtgacttccggcaggccgtatttgaagcggatcatctcgccctgctcggtcacgcgcagaccgcctttcagactgcctggcggttgcgaaagcagcgccgcgtgggctggcgcgccgccacggccaatagatccgccgcggccgtggaagagggtaagctcgatgccggctttttcacaggttttgatcagggcgtcctgcgcctgatactgcgcccatgacgcggccataacgccggcgtctttcgccgagtcggagtagccgatcatgaccatctgcttaccctgaatcagtccgcgataccagtcgatattcaacaactgggtcatcacgtcgtcggcattgttcaggtcatcgagggtttcaaacagcggcgcgaccggcatggcaaagccgatacctgcctctttcagcagcagatgcacagccagcacatcagacggcgttttcgccattgaaattacgtaggcggcgatcgatccttttggcgcttcggcaataaccttgcaggtttcaagcacttcgcgggtatcgttgctcggctcccagttacgcggcagcagcggacgtttggagttcagttcgcggatcaggaaggcctgcttgtcggcttccgaccagctttcgtagtcgccaataccgaggtagcgggtaatttcgcccagcgcttcagtatggcgggtactttcctggcggatatcaatacgcaccagcggtacgccgaaacacttcacgcggcggagcgtgtcgagtaactcgccgttggcgataatgcccatgccgcaggcctgtaacgactggtagcaggcgtacagaggttcccagagctgctcgttttgcgtcagcaggccagccggtttgggcagcttctcgcctttcagacgcgcttccagccaggactgggtcgccatcagacgggcgcgcaattttttcatcaggtagcgatacggctcagacgcgccttcttcgcccactaacgccagcagctccggcgtggcgtcgaccatcgacagttctgataccagaacatgaatgtctttcaggaacagatcggtggctttccagcggcttaacaagagtacgtggcgggtgatatccgccgtcacgttcgggttgccgtcacggtcgccgcccatccaggaggtaaaacgtaccggcacaaaatccaccggcaatttgtagccgagattttcttccagctgttcgttcagttcacgcagatagttaggtacgccctgccacaggctgttctcaaccacggcgaagccccatttggcttcatccaccgggcttggacgctgcttgcggatctcatccgtatgccaggattgggcaatcaactggcgcaggcgacgcattacctggtggcgttcgtagtcggcgatatcggtattatcaagctgttttagacagttgttgatttcacccattttgtgaataagcgtacggcgggtaatttctgtcggatgggcggttagcaccaactccagagacagcgactctaccgcttttttgatggttgcgtcgttgaggtccggttggtttttcagtttgcgcagagtgcgggcaatcacttccgggttgctggcggcttcgccttttggcgaaatgctgtggtattgctcggcagtattggccaggttcaggaactgactaaacgcgcgcgcaactggcagcagctcgtcattagacaaattttgtagcgtggtgagcagctcctggcgattagcttcattgccggcgcgtgaagatttggatagcttacggattgtttctacgcgatcaagaatgtgttctcccagcgcatccttgatggtttctcccagcaccttgccgagcatactgacattactacgcaacgcggaatattgttcgttcatatgaccccagacaccccatctttaatgtaattgccctgtctctttcatgccacagcggcagtggctgcgctcgcccgtatgccagttctgcggaatgggctcgtttgccgccttgctgtgacgtgaaatttttcggactttgctttttagccgtcttttataaagccacgtaaaacccgtggcgtcaattactgcgaaatcggttcagcaaacgaagaaatgacggtaatttattaaagttaattcgcatcgtgccaaataagaaatgcttatgaacatgtggcgtagagacgccggatggcgctgcgcttatccggcctacaagacggggtaggcccggtaaacatcacgtcaccgggcaatatgcattaatgccagcaaaaatggtgtactacctgggtaatcaattcccgggttggcttaataaaacgcgtttcgagatattcatccggctgatgcgcctgattaattgagcccggaccaagcaccagcgttgggcataatgtctgcataaacggcgcttcagtacagtagttcaccacgtcggttttcgttcccaacagtttttctactacttcaaccagttggtggtccggtggacactcataacctggaatcggcggatgtaattccgccaccgtcaggcggcccggccagcgttcgcttaccggggccagcgcgtcgttaagcagtccattaaggtcgtttaacgtcatgcccggcagtggacgaatatccatatgcaattcgcagcaggcgcagatacggtttgaggcatcgccgccgtgaatatggcccagattcagcgttggatacggaacggtaaacgcctcgtagtgataccgcgctttcagcgagtcacgcagttgcatgatatggccaatcgcatcgtgcatcagttcaatggcgttaaccccacgcgccgggtcgctggaatgaccggactgccccaggacgcgaacgacattagagatatgccctttgtgcgcgcgtatcggttgcaacgacgtcggttcgccaatgatcgcgcagtccggacgtaatgccgtggttttggaaaaataacgcgcccccgccatgctggtctcttcatcggcggtcgccagaatgtagagcggctttttcaactttgtgacgtcaacgtcacgtagcgcgtccagaataaaagcgaagaagcctttcatatccgcagtgcccagaccatagagcttattgtcgtgctcggtcagcgtgaacgggtcgcgcgtccagcgtccgtcatcaaagggaaccgtgtcggtatggccggtcagcagcaaaccgcccgcgccatgtccggtgctggcgagcatattaaatttgtttcgcgttcctggaaccggttgaacctctacgttgaaaccaagatcgctgaaccagcctgcaagcaaagtgattaaagacgcattactttgatccagggattcttcggttgcgcttatcgacggtgtggcaatcaaagcgcggtaaatctcgataaatggcggtaaaacgtttttcattgttgacacacctcaggtcatgatagtatcaatattcatgcattaattatgaataaaaatacattaacgttgagcataaaggaacccgatgttgaatacgctgattgtaggcgctagcggttatgcgggcgcagagcttgtaagctacgtaaatcgccacccacatatgaccataaccgctttgaccgtctcagcgcaaagcaatgatgcaggaaagttaatttctgatttacatccgcagttaaaagggattgtcgacctgccattgcaaccgatgtcggatgtacgtgactttagcgcagatgttgatgtggtgttcctggcgacagcgcatgaagtgagccacgatctggcgccgcaatttttacaggccggatgcgtcgtattcgatctttccggcgcgtttcgggtaaacgatcgcgccttctatgaaaagtattacggatttactcatcagtatcctgagctgctggagcaggcggtgtacggtctggcggagtggaatgtcgataaactgaacacggcgaatctgattgcggttcctggttgctatccaaccgcagcgcagttgtcgctaaaaccgctgattgacggcgggcttctcgatctgacgcagtggccggtaattaatgccaccagcggggtgagcggcgcggggcgcaaggcggcaatatcgaacagtttctgtgaagtgagtttgcaaccgtatggcgtgtttacgcatcgtcatcagccggaaatcgccgtccatctgggcgcggaggtcatcttcaccccgcatctggggaatttcccgcgcgggattctggaaaccattacctgccgcctgaaagcgggagtaacccatgcgcaggtcgccgacgtgttgcaaaaagcctatggcgacaaaccgctggtgcgcctgtatgacaaaggcgttccggcgttaaagaacgtcgtcgggctgccgttctgcgatattggttttgccgtccagggcgaacatctgattgtggtggcaaccgaagacaacttgttgaaaggcgcagcggcgcaggcggtgcagtgcgctaatattcgttttggcttcgctgaaacgcagtctcttatttaagggtgaaatgatgaatccattaattatcaagctgggtggcgtattactggatagcgaagaggctctggaacgtctttttaccgcgctggtcaactatcgtgagtcccatcagcgtccgctggtgattgttcacggcggcggttgcgtggtggatgagctgatgaaagggcttaatttgccagtgaaaaagaaagacggcctgcgcgtgacgcctgccgatcagattggcatcattaccggcgcgctggcgggaaccgctaacaaaactctgctggcctgggcgaagaaacaccatatcgcctctgttggtctgtttctgggcgatggcgacagcgtaaacgtgactcaactcgatgaagcgttaggccacgtcgggctggcgcagccggggtcgccgaagctgattaacatgctgctggaaaacggctttctgccggtggtcagctccattggcgtaacagacgacggtcaactgatgaacgtcaacgccgatcaggcggcaaccgcgctggcggcgacgctgggggccgatctgatcctgctttccgacgtgagcggtattctggacggcaaaggccagcgtatcgccgaaatgacggcgtccaaagccgagcagcttatcgaccagggcattattaccgacgggatgattgtgaaagtgaatgcggctctcgatgctgcgcgggcgctggggcgcccggtggatatcgcttcctggcgtcatgcggagcaactgccggcgctgtttaacggcacgccgattggcacgcgtattctggcttaactatttgttcgcccgatggcggctgcgtcttatcgggcctatgtgaacagaaattgtaggccggataagcgtagcgccatccggcagtgaaattcgaagaatttaaggaagtctattatggcactttggggtgggcgttttacacaggcggcagaccagcggtttaaacaattcaatgattcgttgcgcttcgattaccgtctggcggagcaggatattgtcggttctgtggcctggtccaaagcattggtcacggtaggcgtactgactgccgatgagcaacgacagttggaagaagcgctgaacgtgctgctggaagaggttcgcgcgaatccgcagcaaatcctgcaaagcgatgcggaagatatccatagctgggtggaaggtaagctcatcgacaaagtgggtcagttgggtaaaaagctgcacaccgggcgcagccgtaacgatcaagtggcgacggacctgaaactgtggtgcaaagagacggtgagggaactgcttaccgctaaccgccagttacagagcgcgctggtggaaaccgcgcaggcgaaccaggacgcggtaatgccgggatatacccatctgcaacgcgcgcaaccagtgactttcgcccactggtgtctcgcgtatgtcgaaatgctggcgcgcgatgaaagccgcctgcaggacacgcttaaacgtctggacgtgagtccgctaggctgcggcgcgttggcgggaacggcctatgaaattgaccgtgaacaattggcaggctggctgggctttacctctgcgacccgcaacagcctggacagcgtgtccgatcgtgaccacgtactggaactgctttctgatgcggctatcggcatggtgcatctgtcacgcttcgcggaagatctgattttctttaattctggtgaagcgggctttgtagagctttctgaccgcgtgacttccggttcatcgttaatgccgcagaagaaaaacccggacgcgctggagctgattcgcggtaagtgcggtcgcgtacaaggggcgctaaccggcatgatgatgactttaaaaggtctgccgctggcgtataacaaagatatgcaggaagacaaagaagggctgttcgatgcgctcgatacctggcttgactgcctgcatatggcggcgttggtgctggacggtattcaggtgaaacgcccacgttgtcaggacgcggcgcaacaggggtatgccaacgccacggagctggcggattacctggtcgcgaaaggcgtgccgttccgcgaagcgcaccatattgttggcgaagcggtggtagaagctattcgccagggtaagccgctggaagcgttgccgctggccgatttacagaaattcagccgcgtgattggcgacgatgtgtatccgatattgtctttgcagtcgtgtctggataaacgggcggcaaaaggcggcgtttctccgctgcaggtggcgcaggccatcaacgatgcgaaggcgcgcctcgcgttgtaagccttataagcatagcgccatcaggcaatactgcccggccgagcatcagcgacgccgggtttttttacgcaaaaaaaaagcggaccagaggtccgcaaaagttcacgttggctttagttatttcgggttcgagagataccctctgaacgggcggtgtcttcaagggttaaacgagaaaccgctccgttctgtgatgtattattaatcagaaaggttgatagggataatcgttcattgctatgctacctatcgccatgaactatcgtggcgacggaggatgaataatgaatattcgtgatcttgaatatctggtggcgttagccgaacatcgccatttccggcgagcggcggactcctgtcacgtcagccagccaacccttagcgggcaaatacgtaagctggaagatgagctgggcgttatgctgctggagcgtacgagccgtaaggtgctgtttacccaggcgggcttactgctggtggatcaggcgcgtaccgtactgcgtgaggtcaaggtgctcaaggagatggcaagccaacaaggcgagacgatgtccggcccgctgcatattggtttaatcccaacaattggtccctatttgctgccgcttatcattccaatgttgcaccagactttcccgaagctggaaatgtatctgcatgaggcgcaaacgcatcagttgttagcgcaactcgatagcggcaagcttgactgcgctattctggcgctggtgaaagagagcgaggcgtttatcgaagtgccgctgtttgatgagcccatgatgctggctatttatgaggatcatccgtgggcgaatcgcgatcgcgtgccgatgtccgatctggcgggcgagaaattgctgatgctggaagatggccactgtctgcgcgatcaggcgatggggttctgttttgaagcgggagcggatgaagatacccatttccgggcgaccagtctggaaacgctgcgcaacatggtggcggcgggcagtggtattacactactccccgcgctggccgtaccgcaggagcgtaagcgcgacggcgtggtttatctgccatgcattaagccggagccgcgtcgtaccgtggggctggtttatcgcccgggatcgccgctgcgtagccgttatgagcaactggcagaggccatccgtggcgcaatggatggccatttcgacaaggcgttaaaacaggcggtttaagccgttcaacgccgcaacccgataagcttccgccatggttgggtagttaaaggtggtgttaacgaagtattcgatggtgttaccgccacctttctgctccatgatcgcctggccgatatgaataatttcggcggcgcgttcgccaaagcagtgaatccccagaatttctttggtttcgcggtggaagagaatttttagcgtgccgacgttcatgccgacgatttgcgctcgcgccagatgcttaaattgcgcgcggcccacttcgtaaggcactttcattgccgttaactgctgctcggttttgccgacagaactgatttccggaatggtataaatcccggtggggatatcttcgatgagatgcgcggtcgcttcgcctttcaccagcgcctgcgctgcaatacgcccctgatcgtaggcggcggaggccagactgggatagccaatcacgtcgcccaccgcatagacgtgcggcagggcggtctggtacatactgttgactttgagctgtccacggctgtctgtttccagaccaatattctccagcgccagcgaatcggtgttaccggtacggccattagcatagagcaggcagtcagccttcagttttttgccggatttcaggtgcatgatgacgccatcatcgcagccttcgattttctcatactcttcattgtggcgaataaccacgccgctattccagaaatggtaagagagagagtcggacatctcctgatcgagaaaggccagcaggcgatcgcgggtgttgatcagatccactttcacatccataccgcggaagatggacgcatattcgcagccgataacgccggcgccgtaaataataacgtggcgcggttcatggtggagactcaggattgagtcgctgtcataaatgcgcggatgcgagaaatccacatcattgggatggtaaggacgcgaaccacaggcaataacaaatttttctgccgtcagggtttcaaccgtgccgtcatggcattccagcgccagggtatgttcgtcaataaaatgggcgttgccctgcaatatttcacagtggttacgctcataaaacccctgacgcatacgcgtttgttgattaatcacgttatcggcatgattaaggatgtcggcgaaagaagaacgaaggagacgggagtggtcgctatagagcgggttttgattaaattcaataatgcggctgacggcgtggcgaagggctttggatgggatggtgccccagtgggtacatccgccgccaacgttatgataacgctcaatcaccgcgacgcgtgctccttgcttaaccagacccattgcagcgccttcaccgccggggcctgaccctatgacgactgcatcataatcccaggaatgtggcatggtattactcacctgtttttatacataaaataaacacgatgataacatttgcccagctttaacccaattatcgttgtgcttttttgcgaagccggagcacaaactgtctgtaaacaatcattcacaatccagtgtgaacccgttacttttattctctggtatagtgccgaataaggcatatggaaggattcagacattgtgatgggtgttagagcgcaacaaaaagaaaaaacccggcgttcgctggtggaagccgcattcagccaactgagcgctgagcggagttttgccagcctgagtttgcgtgaggtggcgcgtgaagcgggcattgcgccaacgtcgttttaccgtcattttcgcgatgtcgatgaactcggtctgacgatggtggatgaaagcggtctgatgctgcgtcagttgatgcgtcaggcgcgacagcgtatcgcgaaaggcggcagcgtcattcgcacgtcggtctccacatttatggagtttatcggcaacaaccccaacgccttccgtctgttattgcgcgaacgttccggcacttcagcggcgtttcgtgccgccgtcgcacgggagattcagcactttattgcggaacttgccgactatctggaactcgaaaaccatatgccgcgcgcgtttactgaagcccaggccgaagcgatggtaactattgtctttagcgcgggcgcagaggcgttggacatcggcgctgaacagcgtcggcaattagaagagcggctggtattgcaactgcgcatgattgcgaaaggggcgtattactggtatcgccgtgagcaagagaaaatagcacatcattccgaataacgtgaaggacgagtaatgaaacagtcaggtcaagataaaggtacgctgttgctggcgctcatcgctggcttatcgattaacggcacattcgcggcgctgtttagcgctattgtgccgttctccgtattcccgattatctcgctggtgctgacggtatattgcctgcatcagcgctaccaaaatcgtactatgccggtaggtttgccggggttggccgccgcttgtttcattcttggcgttttactgtatagcaccgtcgtgcgtgcagaatatccggatattggctctaatttcttcccggcggtgctgtcggtgattctggtattctggattggctttaaactgcgtaaccgcaagcaggacaccgcggaatagtgtgcgaatgccggatggcggtataaccggccatccgacgtacattttaccttgcggtgagtaataccccgcattccatatgatgtgtatacgggaactgatcgaatagcgccaggcgagacaccgtgtgcgtctggcttaacgtttccaggtttttgcacaacgtttccggattgcaggaaatgtacagaatacgtggataagcctgcaccattttttccgtttcgctgtccagaccgctgcgcggcggatcgacaaaaatggtttcgcactgatagcgcttcaggtcgatcccctgcaggcggttaaactcacgaacgccattcatcgcctgggtaaactcttccgccgccatgcgaataatttgcacattatcaatatgattagcggcaatattgtactgtgcggcagcgacggacggtttggcgatttcggttgccagcacgcggttaaaattgcgcgccagcgctaaagaaaaattgccgttgccgcaatacaactcaagcagatcgccttttgagtctttcgtcacctccagcgcccactctaacatctgaatattcatggcggcgtttggctgcgtaaagctgttttcgacctggcggtagatcatctctttacctgccacaggcagacgctcatcaatataatcctgatccaattcgattttagttttagtggcccggccaatcaggtgtacgttcagaccttgcgcgcgtaaagcatcgcgtaacgcagtggcggcttcacgccactcttcgtccagcttcttatggtacagcaacgacactaccgcctggttgctcaaggtcgtgagataatcgatctggaacagcttatgccgcagtgcatgattatcgcgcacgccggcaatcatcgccttcattaaggtattaatcagttggctggccgccgggaaggtgtcaacgcgaatccggcttttggtctgctgatcaaacataatgtggtacaggtcatcgccgtcatgccacaggcgaaattccgcacgcatacgatagtgactgaccggcgagcgaaatacttccggaaccaggccagaaaacggcgccatcatactctgcaagcgcgccactttttcggccagctgcgcctcatactgttctgtcggaagatgttcgggggtcatatcgcatcctgaataataaaagtacgcggggattgtagggattgctcagtggatgtccagctattgatgatttctgatttgtgatgcgcggtctggacagggtgttgtgacagacggtagcatccgtgggccggtcctgtgagttaatagggaatccagtgaaaatctggagctgacgcgcagcggtaaggaaaggtgagatgagagcgtaagcagacactgcctccggcgggaagtcatcatttctgctatccagccaacggataaccctccaagcccgaagacctgccggctaacgtcgcatctggtttttcatcatcgcgtactatcgatgaagcctgcggcatccttcttatattgtggatgctttacaatgattaaaaaagctacgctgctgacggcgttctccgtcacggccttttccgcttgggcgcaggacactagcccggataccctggttgtcaccgccaaccgttttcagcagccgcgcagcgcggttctggcgcccgttaccatcgtgacgcgtcaggatattgaacgctggcaatcgacctccgtaaatgatgttctgcgccgtttgcctggcgtcgatattgcgcagagcggcggcgccggacaaaactcctccattttcattcgcggcaccaactccagccatgtactggtattgattgacggcgtgcgtctgaatttagcaggcgtgagcgggtccgccgatctcagccagttcccggtgtcgctggtacagcgcattgaatatattcgcggtccgcgctccgctatttatggttccgatgctatcggcggcgtagtgaatatcattacgacgcgcgataacccaggcacagaattaaccgctggatggggaagcaatagctaccagaattacgacatctcgacgcaacagcaacttggcgaaaacacgcgggcgacgttgatcggcgattacgaatacaccaaagggtttgacgtggtagcgaaaggcggtaccgggatgcaggcgcagcctgaccgggacggctttttgagtaaaacgctttatggcgcgttagagcataccttttctgatcgctggagcggattcgtgcgtggttatggctacgataaccgtaccgattacgacgcctattactcgccgggctcgccgctgattgatacacgcaaactttatagccaaagctgggacgccgggctgcactttaatggcgaacgtattcagtctcagctggtttcaagctatagccacagtaaagattacaactatgatccgcactatggccggtatgatacctccgccacgctggatgagatgaaacagtacaatgttcaatggaccaacagtgtggtcgtggggcacggtaatgttggggcgggcgtagactggcagaaacagactaccacgccaggtaccggctatgtgcccgagggatatgaccagcgtaataccggggtttacctgacaggattacaacagttgggtgacttcactctggaagcggcggcgcgcagtgatgacaactcccagtttggtcgtcatggtacatggcaaaccagcgcgggatgggagtttatagaaggttatcgctttattgcctcctacggaacctcctacaaagcgcctaatttgggccaactgtatggttattacggtaatccgaacctgaatcctgaaaagagtaaacagtgggaaggcgcatttgaagggctaaccgctggcgtcagctggcgtatttcaggttatcgtaacgatattaatgacatgatcgattatgacgatcatctgcaaaaatattacaacgaaggtaaggcgcgcattaaaggtattgaggcgacggcgaatttcgataccggaccgttaacgcatacggtcagttatgattacgttgatgcgcgtaatgcgattaccgatacgccattaccccggcgttccaaacagatggcaaaatatcaacttgactgggacgtttacgattttgactgggggatgacatatcaataccttggttcccgctatgattcggattactccgcttacccataccggacagtaaaaatgggcggcgtcagtttatgggatcttacggttgcatatccggtcacctcacatctgacagttcgtggtaaaatagccaacctgttcgacaaagattacgagacagtttatggctaccaaactgcaggacgagaatacaccttgtctggcagctacaccttctgaaccacgtcccaccgtgctggtatttgattccggcgtcggtggattgtcggtctatgatgagattcggcggctcctgccggatctccactatatatatgctttcgataacgtggctttcccctacggggaaaagagtgaaacgtttatcgtcgagcgcgttgtcgagattgtgactgcggtacagcagcgctatcccctttcactggcggtgattgcctgtaataccgccagtacggtctcacttcccgcattacgtgaaaagtttgccttcccggtggtgggcgttgtgcctgcgattaaaccagcggcgcggctgaccgcaaatggcgtcgtcgggctactggcgacgagagccacggtcaaacgtccttatactcacgagctgattgcgcgcttcgccaatgaatgtcagatagcgatgttagggtcggcagaactggtggaactggcggaagctaaattacatggcgattcggtatcgctggaagaactgcgccgcatattacgcccatggctacgaatgccggagccgcctgacacggtcgttctggggtgtacgcatttccctctattacgggacgagcttttgcaagtcctgcccgaagggacgcggttagtggattccggcgcggcgatagcgcgtcgtacagcctggctgttggaacatgaagcgccggatgcgaaatcaaccgatgccaatattgcttattgcatggcaatgacgccaggagctgaacaattattacccgttttacagcgttatggctttgaaacgctcgaaaaactgccggtttaatggcgttttgggtaaataccaggcacttgagaaattattttaaatttcctcttgtcaggcagaaataactccctataatgcgccaccactgacacggaacaacggcacacaggccgccgggccagcggggttcagatcagaacctcacggagaaaagcgaaaataaacgcttgactctgaagcgggaaagcgtaatatgcacaccccgcgccgctgagaaaaagcgaagcggcactgctctttaacaatttatcagacaatctgtgtgggcactcgaagatacggattcttgacgtcctaggacgaaaaatgaataccaagtctcaagagtgaacacgtaattcattacgaagtttaattctttgagcatcaaacttttaaattgaagagtttgatcatggctcagattgaacgctggcggcaggcctaacacatgcaagtcgaacggtaacaggaagcagcttgctgcttcgctgacgagtggcggacgggtgagtaatgtctgggaaactgcctgatggagggggataactactggaaacggtggctaataccgcataacgtcgcaagaccaaagagggggaccttcgggcctcttgccatcagatgtgcccagatgggattagcttgttggtgaggtaacggctcaccaaggcgacgatccctagctggtctgagaggatgaccagccacactggaactgagacacggtccagactcctacgggaggcagcagtggggaatattgcacaatgggcgcaagcctgatgcagccatgccgcgtgtatgaagaaggccttcgggttgtaaagtactttcagcggggaggaaggtgttgtggttaataaccgcagcaattgacgttacccgcagaagaagcaccggctaactccgtgccagcagccgcggtaatacggagggtgcaagcgttaatcggaattactgggcgtaaagcgcacgcaggcggtctgtcaagtcggatgtgaaatccccgggctcaacctgggaactgcattcgaaactggcaggcttgagtcttgtagaggggggtagaattccaggtgtagcggtgaaatgcgtagagatctggaggaataccggtggcgaaggcggccccctggacaaagactgacgctcaggtgcgaaagcgtggggagcaaacaggattagataccctggtagtccacgccgtaaacgatgtctacttggaggttgtgcccttgaggcgtggcttccggagctaacgcgttaagtagaccgcctggggagtacggccgcaaggttaaaactcaaatgaattgacgggggcccgcacaagcggtggagcatgtggtttaattcgatgcaacgcgaagaaccttacctggtcttgacatccacagaagaatccagagatggatttgtgccttcgggaactgtgagacaggtgctgcatggctgtcgtcagctcgtgttgtgaaatgttgggttaagtcccgcaacgagcgcaacccttatcctttgttgccagcgattaggtcgggaactcaaaggagactgccagtgataaactggaggaaggtggggatgacgtcaagtcatcatggcccttacgaccagggctacacacgtgctacaatggcgcatacaaagagaagcgacctcgcgagagcaagcggacctcataaagtgcgtcgtagtccggattggagtctgcaactcgactccatgaagtcggaatcgctagtaatcgtggatcagaatgccacggtgaatacgttcccgggccttgtacacaccgcccgtcacaccatgggagtgggttgcaaaagaagtaggtagcttaaccttcgggagggcgcttaccactttgtgattcatgactggggtgaagtcgtaacaaggtaaccgtaggggaacctgcggttggatcacctccttaccttaaagaaacggtctttgaagtgctcacacagattgtctgatgaaaaacgagcagtaaaacctctacaggcttgtagctcaggtggttagagcgcacccctgataagggtgaggtcggtggttcaagtccactcaggcctaccaaattttccctgaatactgcgttgtgaaataactcacatactgatgtatgcttcgttattccacgccttgtctcaggaaaaattatcggtaaagaggttctgactacacgatggggctatagctcagctgggagagcgcctgctttgcacgcaggaggtctgcggttcgatcccgcatagctccaccatctcgtgagtgtttacgaaaaaatacttcagagtgtacctgaaagggttcactgcgaagttttgctctttaaaaatctggatcaagctgaaaattgaaacacagaacaacgaaagttgttcgtgagtctctcaaattttcgcgacacgagaatgttttacgaaacatcttcgggttgtgaggttaagcgactaagcgtacacggtggatgccctggcagtcagaggcgatgaaggacgtgctaatctgcgataagcgccggtaaggtgatatgaaccgttataaccggcgatttccgaatggggaaacccagtgtgattcgtcacactatcattaactgaatccataggttaatgaggcgaaccgggggaactgaaacatctaagtaccccgaggaaaagaaatcaaccgagattcccccagtagcggcgagcgaacggggaggagcccagagcctgaatcagcatgtgtgttagtggaagcgtctggaaaggcgcgcgatacagggtgacagccccgtacacaaaagcgcatgtgctgtgagctcgatgagtagggcgggacacgtggtatcctgtctgaatatggggggaccatcctccaaggctaaatactcctgactgaccgatagtgaaccagtaccgtgagggaaaggcgaaaagaaccccggcgaggggagtgaaaaagaacctgaaaccgtgtacgtacaagcagtgggagcacccttcggggtgtgactgcgtaccttttgtataatgggtcagcgacttatattctgtagcaaggttaaccgtataggggagccggagggaaaccgagtcttaattgggcgttaagttgcagggtatagacccgaaacccggtgatctagccatgggcaggttgaaggttgggtaacactaactggaggaccgaaccgactaatgttgaaaaattagcggatgacctgtggctgggggtgaaaggccaatcaaaccgggagatagctggttctccccgaaagctatttaggtagcgcctcgtgaattcatctccgggggtagagcactgtttcggctagggggccatcccggcttaccaacccgatgcaaactgcgaataccggagaatgttatcacgggagacacacggcgggtgctaacgtccgtcgtgaagagggaaacaacccagaccgccagctaaggtcccaaagtcatggttaagtgggaaacgatgtgggaaggcccagacagccaggatgttggcttagaagcagccatcatttaaagaaagcgtaatagctcactggtcgagtcggcctgcgcggaagatgtaacggggctaaaccatgcaccgaagctgcggcagcgaacgtatcacccaagacaactttacggagttgacgattgacggagcgaagcgacgtcaaagcgttcattaaagtcgagttggcttagggatacgttcgttgggtaggggagcgttctgtaagcctgtgaaggtgtgtcgtgaggcatgctggaggtatcagaagtgcgaatgctgacataagtaacgataaagcgggtgaaaagcccgctcgccggaagaccaagggttcctgtccaacgttaatcggggcagggtgagtcgacccctaaggcgaggccgaaaggcgtagtcgatgggaaacgggttaatattcccgtacttggtgttactgcgaaggggggacggagaaggctatgttggccgggcgacggttgtcccggtttaagcgtgtaggtgtgtgttccaggtaaatccggttcactttaacactgaggcgtgacgacgaggcactacggtgctgaagcaacaaatgccctgcttccaggaaaagcctctaagcatcaggtaacacgaaatcgtaccccaaaccgacacaggtggtcaggtagagaataccaaggcgcttgagagaactcgggtgaaggaactaggcaaaatggtgccgtaacttcgggagaaggcacgctgacacgtaggtgaagtgatttactcatggagctgaagtcagtcgaagataccagctggctgcaactgtttattaaaaacacagcactgtgcaaacacgaaagtggacgtatacggtgtgacgcctgcccggtgccggaaggttaattgatggggtcagcgtaagcgaagctcctgatcgaagccccggtaaacggcggccgtaactataacggtcctaaggtagcgaaattccttgtcgggtaagttccgacctgcacgaatggcgtaatgatggccaggctgtctccacccgagactcagtgaaattgaactcgctgtgaagatgcagtgtacccgcggcaagacggaaagaccccgtgaacctttactatagcttgacactgaacattgagccttgatgtgtaggataggtgggaggctttgaagtgtggacgccagtctgcatggagccgaccttgaaataccaccctttaatgtttgatgttctaacgtggacccgtaatccgggttgcggacagtgtctggtgggtagtttgactggggcggtctcctcctaaagagtaacggaggagcacgaaggttggctaatcctggtcggacatcaggaggttagtgcaatggcataagccagcttgactgcgagcgtgacggcgcgagcaggtgcgaaagcaggtcatagtgatccggtggttctgaatggaagggccatcgctcaacggataaaaggtactccggggataacaggctgataccgcccaagagttcatatcgacggcggtgtttggcacctcgatgtcggctcatcacatcctggggctgaagtaggtcccaagggtatggctgttcgccatttaaagtggtacgcgagctgggtttagaacgtcgtgagacagttcggtccctatctgccgtgggcgctggagaactgaggggggctgctcctagtacgagaggaccggagtggacgcatcactggtgttcgggttgtcatgccaatggcactgcccggtagctaaatgcggaagagataagtgctgaaagcatctaagcacgaaacttgccccgagatgagttctccctgagacttagagtctcctgaaggaacgttgaagacgacgacgttgataggccgggtgtgtaagcgcagcgatgcgttgagctaaccggtactaatgaaccgtgaggcttaaccttacaacgccgaagatgttttggcggttaagagaagattttcagcactgattcagagttgagtacgcaataatttgcgcagcagcgaggcggcaagcgaaggaaaggaaggagcatacagaagtatgtgactgactttacgagcgcaggcaacgccgctgatgcgataaagaattgcgtacagagcacaaagaatttgcctggcggcactagcgcggtggtcccacctgaccccatgccgaactcagaagtgaaacgccgtagcgccgatggtagtgtggggtctccccatgcgagagtagggaactgccaggcatcaaataaaacgaaaggccctgtcggaagacagggccttttgtttttgtctgtttctgccggatggcggctccgccttatccggcctacagggacgcgccgatctaccctcattataaccacaagccttcccaacacagatacggtaaactattgccgattgagtatcaggaaagcagccatgacccactccctaaaaccctggaataccttcggcattgatcattgtgcaaagcacatcgtatgcgctgaaaacgaacaacaactactgagcgcctggcagcaagcaactcgtgagggactgccggttatgatcctgggtgaaggaagcaatgtcctgtttctggaaaattacgccggcaccgtgatccttaaccgcctgaaaggcattgaggtcaatgaaaccgcggacgcctggcacctacacgtcggcgcaggcgaaaactggcatcagctggttcgctacgcgctggacaacaacatgcccggcctggagaatctggcgctcatccctggctgcgttggttcctcgcctatacagaatattggcgcgtatggcgtagaactacagcgcgtctgcgactacgttgactgcgttgaactggaaacgggaaaacgtctgcgtttgtccgcggcggaatgccgtttcggctatcgtgacagtatcttcaaaaatgaatatcaggatcgcgttgcgatcgtcgcggtgggtctgcgtttgtcaaagcaatggcagccggtgttgacctatggcgatcttacttgtttggacccgaaaacggtcaccgcgcaacaggtgtttgatgctgtatgccatatgcgcaccacaaaattgccggatcctaaagtgaatggcaatgcgggcagcttttttaaaaatcccgttgtcgcagccgatatcgctatggaactgttagaacgatttcccaacgcgccgcattaccctcaggcagacggctcagtgaagctggcggcaggctggctgatagatcaatgtcagttgaaaggcgtcaccattggcggcgctgcggtgcatcgccaacaggcgctggtattgattaatgcgaatgatgcgacaagtaaagatgtggtggcgctggcgcatcatgtccggcaaaaagtgggtgaaaaatttaatgtctggctggagcctgaggttcgctttattggtcggtccggagaggtgaacgctgtggagagcattgcatgaaagatactaccgttcccctgacgctgatctcactacttgccgacggagagtttcactcaggcgagcagttgggtgaacggctgggaatgagccgcgcggctattaataaacatatccagacattacgcgactggggagtagatgtatttaccgttcccgggaaaggatatagcttaccggaacccatccagttactggatgctgaccgtatacatagccaactggatagcggaaacgtggcggtattgcccgttatcgattcaaccaatcagtatttacttgatcgaattggcgagctgcgctcaggcgatgcctgtgtagcagaataccaacaggcggggcgtggtcgtcgcgggcgtaaatggttctcaccgtttggcgcgaatctatatctttcaatgtactggcgtctggagcagggccctgcggcggcaataggcctgagtctggtcattggaattgtgatggcggaagtgctgcgtaaactgggcgcagataaagttcgtgtgaagtggcctaacgacctttacctactggaccgcaaactggcgggtattctggtcgagttaaccggtaaaacgggcgatgccgcacaaatagtgattggcgctggtattaacatggcaatgcgtcgcgtagaagaggacgtgataaatcagggatggatcacactacaagaggccggaattacgctcgaccgcaatatgctggccgcaaagctgatttataagctacgtgctgcgcttgagctttttgagcaagaaggtctttctccttatctttcgcgctggaaaaaactggataattttattgatcgcccggtaaaactaattattggtgacaaagaaatatttggtatttctcgcggcattgatactcaaggcgcattattgcttgaacaggatggcgtgattaaaccctggatgggcggagaaatatcgctgcgaagcgccgaatagtaaaaagggggagtcggtactccccttttttctgttatttccgcaatcttacctgttccaccgcatggttagcgctcttggtcataataaggctggcacgttctcgtgtaggtaagatattttgttttaaattcaaccagttaatttctttccaaagcgaagttgctgtattaacagcttcttctttagataatttcgcataattgtggaaataagagtcaggatcggtaaacgccccttcgcggaatttcaggaagcgattgatataccacgtctgaagaagttcttctggcgcatccacgtaaatagagaaatcaacgaaatcagagacaaatacatgatgcggatcgtgaggataatccataccgctttgtaaaacattcaaaccttcaagaatcaatatatcaggctgagcgacggttttatccccttcaggaataacatcgtaaatcaaatgagaatagactggcgccgtcacgttcggtacgcccgacttgaggtcagaaacgaatttcaccagtcggtgcatatcatacgattcggggaacccctttttcttcattaacccgcgttctttcaacacctggtttgggtggaggaagccgtctgtggtaatcaattcaacacggcggtgttccggccagcgactcagcaacgcttgcagaacgcgtgctgtcgtgcttttacccactgcgacgctgcccgcgatactgatgatgtaagggattcgctggccgttagtgcccagaaactgttccaggacagcctgacgacgcagatttgaactgatatagaaatttagcaaacgggagagaggtaaatatatttctgcaacttcttccagcgataaatcttcattaatgccttttaactgcgcgatctcatcctcggtcagggtcatcggcacagaatcgcgaagcgcagcccactggctgcgatcaaactgtaggtaaggcgtcattaacgattgctcttttatactcataagcatgtttctggctgctattgctacatcagttcagcgatgaacgagggccatccctgacatgcaacggcacgtcacatttaagttaatttggacaatgggcaggagggtaacaccagatggggaggaataataagaaaaaatctcgctgtgaaagctatccctgagaagcaatgtgacgaatataccagatacagaagattgctttctatcgacggagcgttgaaatgccgcgtcgtatcctggtcagacggtcggtaaaatgccgaaaatttatgctctcttgtttgaaattagagcatttttgtctcttatagcgcaaaatgtgagcgatagaacattttatgcaattttttagttgcatgagcacgcaggtctccatagaatgcgcgctacttgatgccgacttagctcagtaggtagagcaactgacttgtaatcagtaggtcaccagttcgattccggtagtcggcaccatcaagtccggtggggttcccgagcggccaaagggagcagactgtaaatctgccgtcacagacttcgaaggttcgaatccttcccccaccaccattttcggccgcgcgatggcgcagcccgagacgataagttcgcttaccggctcgaataaagagagtttctctcgatattcagtgcagaatgaaaatcaggtagccgagttccaggatgcgggcatcgtataatggctattacctcagccttccaagctgatgatgcgggttcgattcccgctgcccgctccaagatgtgctgatatagctcagttggtagagcgcacccttggtaagggtgaggtcggcagttcgaatctgcctatcagcaccacttcttttctccttcctgtttttctcttctgtttattagcattcaacaagtcgggcgtgttgcctggttgatgtggtgatatcaccgatttatccgtgtcttagagggacaatcgatgtctaaagaaaagtttgaacgtacaaaaccgcacgttaacgtcggtactatcggccacgttgaccatggtaaaacaacgctgaccgctgccattactaccgtactggctaaaacctacggcggtgccgctcgcgcattcgaccagatcgataacgcgccggaagaaaaagcgcgtggtatcaccatcaacacttctcacgttgaatacgataccccgacccgccactacgcacacgtagactgcccggggcacgccgactatgttaaaaacatgatcaccggtgctgctcagatggacggcgcgatcctggttgttgctgcgactgacggtccgatgccgcagacccgtgagcacatcctgctgggtcgtcaggtaggcgttccgtacatcatcgtgttcctgaacaaatgcgacatggttgatgacgaagagctgctggaactggttgaaatggaagttcgtgaacttctgtctcagtacgacttcccgggcgacgacacgccgatcgttcgtggttctgctctgaaagcgctggaaggcgacgcagagtgggaagcgaaaatcatcgaactggctggcttcctggattcttacatcccggaaccagagcgtgcgattgacaagccgttcctgctgccgatcgaagacgtattctccatctccggtcgtggtaccgttgttaccggtcgtgtagaacgcggtatcatcaaagtgggcgaagaagttgaaatcgttggtatcaaagagactcagaagtctacctgtactggcgttgaaatgttccgcaaactgctggacgaaggccgtgccggtgagaacgtaggtgttctgctgcgtggtatcaaacgtgaagaaatcgaacgtggtcaggtactggctaagccgggcaccatcaagccgcacaccaagttcgaatctgaagtgtacattctgtccaaagatgaaggcggccgtcatactccgttcttcaaaggctaccgtccgcagttctacttccgtactactgacgtgactggcaccatcgaactgccggaaggcgtagagatggtaatgccgggcgacaacatcaaaatggttgttaccctgatccacccgatcgcgatggacgacggtctgcgtttcgcaatccgtgaaggcggccgtaccgttggcgcgggcgttgttgctaaagttctcggctaatcgctgataacatttgacgcaatgcgcaataaaagggcatcatttgatgccctttttgcacgctttcacaccagaacctggctcatcagtgattttatttgtcataatcattgctgagacaggctctgtagagggcgtataatccgaaaggcgaataagcgtttcgatttggattgcctcgcgattgcggggtgaaaatgtttgtagaatacttctgacaggttggtttatgagtgcgaataccgaagctcaagggagcgggcgcggcctggaagcgatgaagtggatagttgttgccatattgctgatcgtcgcaatcgtcggcaactacctctatcgcgacatgatgctgccgctgcgtgcgctggccgtagtaattctgattgctgcagcgggtggtgtcgcgctgttgacgacaaaaggtaaagcaaccgttgcttttgcccgtgaagcgagaaccgaagtccgtaaggtcatttggccgactcgccaggaaacgctgcacaccacgctgatcgtcgctgcggttaccgcagttatgtcactgatcctgtggggactggatggtattctggttcgcctggtatcctttatcactggcctgaggttctgagatgtctgaagcacctaaaaagcgctggtacgtcgttcaggcgttttccggttttgaaggccgcgtagccacatcgctgcgcgagcatatcaaattacacaatatggaagagctgtttggcgaagtcatggtgccgactgaagaagtcgttgagatccgtggcggccagcgtcgcaaaagcgaacgcaaattcttcccgggttacgttctggtccagatggtcatgaacgacgcaagctggcacctggtgcgcagcgtgccgcgtgtgatgggctttatcggcggtacctctgaccgtccggcgccgatcagcgacaaagaagtcgatgcgatcatgaaccgcctgcagcaggttggcgataagccgcggccgaaaactctgtttgaaccgggtgaaatggttcgtgttaacgacggtccgttcgcagactttaacggcgttgtcgaagaagtcgattatgagaagtctcgcctgaaagtgtctgtttctatcttcggtcgtgcgaccccggtagagctggacttcagtcaggttgagaaagcgtaaggctgcgatcaaaaaagcagcgatctaatcgttgcatagggcgcgaaattgacatacaatttcgcgccttttgtttttatgggccttatgcccataaagcgatatttatcacggggagcttctttgaagcgatactacccaattcgaggaatttagaatggctaagaaagtacaagcctacgtcaagctgcaggttgcagctggtatggcgaacccgagtccgccggttggtccagcactgggtcagcagggtgtgaacatcatggaattctgcaaagcgttcaacgcaaaaacggattccatcgaaaaaggtctgccgattccggttgttattaccgtttacgctgaccgttctttcaccttcgttaccaaaacgcctccggcagctgttctgctgaaaaaagcggctggtatcaagtctggttccggcaagccgaacaaagacaaagtaggtaaaatttcccgcgctcagctgcaggaaatcgcgcagaccaaagctgccgacatgaccggtgccgacattgaagcgatgactcgctccatcgaaggtactgcacgttccatgggcctggtagtggaggactaagaaatggctaaactgaccaagcgtatgcgcgtgatccgtgaaaaagttgatgcgaccaaacagtacgacatcaacgaagctattgccctgctgaaagagctggccactgctaaattcaacgaaagcgttgacgttgccgttaacctcggcatcgacgctcgtaaatctgaccagaacgttcgtggcgcgactgtactgccgcacggtactggccgttctgttcgcgttgccgtatttacccaaggcccgaacgctgaagcagctaaagctgctggcgctgagctggtaggtatggaagatctggctgaccagatcaagaaaggcgaaatgaacttcgacgttgttatcgcatccccggatgcaatgcgcgttgttggccagctgggccaggttctgggtccgcgcggcctgatgccaaacccgaaagtcggtaccgtaactccgaacgttgctgaagcggttaagaacgctaaagcaggtcaggttcgttaccgtaacgacaaaaacggcatcatccacaccaccatcggtaaagtggactttgacgctgacaaactgaaagaaaacctggaagctctgctggttgcgctgaaaaaagcaaaaccgagccaggcgaaaggcgtgtacatcaagaaagttagcatctccaccaccatgggtgctggcgttgccgttgatcaggctggtctgagcgcatctgcgaactaagattagtctttacgtgggcggtgattttgtctacaatcttacccccacgattctgttgaaatataacagagcactatgcgagtcatttgaattgcagcaaggcagcaagtgagtgagtcgccaggagcatagttaactatgtgactggtgtgaacgagcgcagctaacacagctgcggttcaaaggacgaagtcatagaaagaatttgttcgttggagcctggcctatccaggcctccgtcgaagaccgcaggcgtctcgcaagaggcttaatcccctgcgtagacggtgacagaacgctaagattattttttatactctggcttgtttctgctcaccgtattaagacgctcttctcgttgagatgagtgaagtgagttccggaacatgagttccggcaaacatccaggagcaaagctaatggctttaaatcttcaagacaaacaagcgattgttgctgaagtcagcgaagtagccaaaggcgcgctgtctgcagtagttgcggattcccgtggcgtaactgtagataaaatgactgaactgcgtaaagcaggtcgtgaagctggcgtatacatgcgtgttgttcgtaacaccctgctgcgccgcgtcgttgaaggtactcagttcgagtgcctgaaagacacgtttgttggtccgaccctgattgcatactctatggaacacccgggcgctgctgctcgtctgttcaaagagttcgcgaaagcgaatgcaaaatttgaggtcaaagctgcagcctttgaaggtgagctgatcccggcgtctcagatcgaccgcctggcaactctgccgacctacgaagaagcaattgcacgcctgatggcaaccatgaaagaagcttcggctggcaaactggttcgcacactggctgctgtacgcgatgcaaaagaagctgcgtaatcgcagttgtctttatcaagcatttgcttacgtataaacttattctgatattcaggaacaatttaaatgtctatcactaaagatcaaatcattgaagcagtatccgctatgtccgtaatggacgttgtagaactgatttctgcaatggaagaaaaattcggtgtttccgctgctgctgctgtagctgtagctgctggcccggctgaagctgctgaagaaaaaactgaattcgacgtaattctgaaagctgctggcgctaacaaagttgctgttatcaaagcagtacgtggcgcaactggcctgggtctgaaagaagctaaagacctggtagaatctgctccggccgctctgaaagaaggcgtgagcaaagatgacgctgaagcactgaaaaaatctctggaagaagctggcgctgaagttgaagttaaataagccaacccttccggttgcagcctgagaaatcaggctgatggctggtgactttttagtcaccagcctttttgcgctgtaaggcgccagtagcgtttcacactgtttgactactgctgtgcctttcaatgcttgtttctatcgacgacttaatatactgcgacagagcgtacgttctgtgtaaatcgcaatgaaatggtttaagcgtgatagcaacaggcattgcggaaagtatccattttccggtcaacaaaatagtgttgcacaaactgtcccccgcaggacagatgggtcgacttgtcagcgagctgaggaaccctatggtttactcctataccgagaaaaaacgtattcgtaaggattttggtaaacgtccacaagttctggatgtaccttatctcctttctatccagcttgactcgtttcagaagtttatcgagcaagatcctgaagggcagtacggcctggaagcagccttccgttccgtgttcccgattcagagctacagcggtaattccgagctgcagtacgtcagctaccgccttggcgaaccggtgtttgacgttcaggaatgtcagatccgtggcgtgacctattccgcaccgctgcgcgtaaaactgcgtctggtgatctacgagcgcgaagcgccggaaggcaccgtaaaagacattaaagaacaagaagtctacatgggcgaaattccgctcatgaccgacaacggtacctttgttatcaacggtactgagcgtgttatcgtttctcagctgcaccgtagccctggcgtcttctttgactccgacaaaggtaaaacccactcttcgggtaaagtgctgtataacgcgcgcatcattccttaccgtggttcctggctggacttcgaattcgatccgaaggacaacctgttcgtacgtatcgaccgtcgccgtaaactgcctgcgaccatcatcctgcgtgcgctgaactacaccactgagcagatccttgacctgttctttgagaaagtcgtcttcgaaattcgcgacaacaaactgcagatggagctgattccagaacgtctgcgtggcgaaaccgcgtcgttcgatatcgaagctaacggcaaagtgtacgttgaaaaaggccgtcgcattaccgcgcgtcacatccgtcagctggaaaaagacgatatcaagcatatcgaagttccggttgagtacatcgcaggtaaagtcgtctctaaagactacgttgacgaatctactggcgagctgatctgcgcggcgaacatggagctgagcctggatctgctggctaagctgagccagtccggccacaagcgtatcgaaacgctgtttaccaacgatctggaccacggcccgtacatttctgaaacggtacgcgtcgacccaactaacgatcgtctgagcgcgctggtagaaatctaccgcatgatgcgccctggtgagccgccgacacgcgaagcggctgaaagcctgtttgagaacctgttcttctccgaagaccgctatgacctgtctgcggtgggtcgtatgaagttcaaccgttctctgctgcgcgacgaaatcgaaggttccggtatcctgagcaaagacgacatcattgatgtcatgaagaagctcatcgatatccgtaacggtaaaggcgaagtggatgatatcgaccacctcggcaaccgtcgtatccgttccgtcggcgaaatggcggaaaaccagttccgcgttggcctggtgcgtgtagagcgtgcggtgaaagagcgtctgtctctgggcgatctggataccctgatgcctcaggatatgatcaacgccaagccgatttccgccgcagtgaaagagttctttggttccagccagctgtctcagtttatggaccagaacaacccgctgtctgagattacgcacaaacgtcgtatctccgcactcggcccaggcggtctgacccgcgaacgcgcaggcttcgaagttcgagacgtacacccgacgcactacggtcgcgtatgtcctatcgaaacgccggaaggtccgaacatcggtctgatcaactccctgtccgtgtacgcacagactaacgaatatggcttccttgagacgccgtaccgtcgtgtggttgatggcgtggttactgacgaaattcattacctgtctgctatcgaagaaggcaactacgttatcgctcaggcgaactccaacctggatgacgaaggccactttgtagaagatttggtgacctgccgtagcaaaggcgaatccagcttgttcagccgcgaccaggttgactacatggacgtttccacccagcaggtggtctccgtcggtgcgtccctgatcccgttcctggaacacgatgacgccaaccgtgcattgatgggtgcgaacatgcaacgtcaggcggttccgactctgcgcgctgacaagccgctggtgggtaccggtatggaacgtgctgtcgccgtcgactccggtgttactgcagtagctaaacgtggcggtactgttcagtacgtggatgcgtcccgtatcgttatcaaagttaacgaagacgagatgtacccgggcgaagcgggtatcgacatctataacctgaccaaatacacccgctctaaccagaacacctgtatcaaccagatgccatgtgtgtctctgggcgagccggttgaacgcggcgacgtgctggcagacggtccgtccaccgacctcggtgaactggcgctcggtcagaacatgcgcgtggcgttcatgccgtggaacggctacaacttcgaagactccattctcgtttccgagcgtgttgtccaggaagaccgtttcaccaccatccacattcaggaactggcgtgcgtgtcccgtgacaccaagctggggccggaagagatcaccgctgatatcccgaacgtgggtgaagctgcgctctccaaactggatgaatccggtatcgtttacatcggcgcggaagtgacaggcggtgacattctggtcggtaaggtgacgccgaaaggtgaaacccagctgacgccggaagagaaactgctgcgtgcgatcttcggtgagaaagcgtctgacgttaaagactcttctctgcgcgtacctaacggtgtctccggtacggttatcgacgttcaggtctttactcgcgatggcgtagaaaaagacaaacgtgctctggaaatcgaagagatgcagctcaagcaggcgaaaaaagacctgtctgaagaactgcagatcctcgaagcgggcctgtttagccgtatccgtgcggtgctggtttccagcggcgttgaagctgagaagctcgacaaactgccgcgcgaccgctggctggaactcggtctgaccgacgaagagaaacaaaatcagctggaacaactggctgagcagtatgacgaactgaaacacgagttcgagaaaaaacttgaagcgaagcgccgtaaaatcacccagggcgacgatctggcgccgggcgtgctgaagatcgtgaaggtctatctggccgttaaacgccgtatccagccgggtgataagatggcaggtcgtcacggtaacaagggtgttatctctaagatcaacccgatcgaagacatgccttacgatgaaaacggcacgccggtagacatcgtactgaacccgctgggcgtaccgtctcgtatgaacatcggccagattctggaaacccacctgggtatggctgcgaaaggtattggcgacaagattaacgccatgctgaaacagcagcaggaagtcgcgaaactgcgcgaattcatccagcgtgcctacgatctgggcgccgacgttcgtcagaaagtcgacctgagcaccttcagcgatgatgaagtgctgcgtctggcagaaaacctgcgtaaaggtatgccgattgccacaccagtgtttgacggtgcgaaagaagcggaaatcaaagagctgctgaaactgggcgacctgccgacctccggtcagatcaccctgttcgatggccgtacgggtgaacagttcgaacgtccggtaaccgtcggttacatgtacatgctgaaactgaaccacctggttgatgacaagatgcatgcgcgttctaccggttcttacagcctggttactcagcagccgctgggtggtaaggcgcagttcggtggtcagcgcttcggggagatggaagtgtgggcgctggaagcttacggcgccgcctacaccctgcaggaaatgctcaccgttaagtctgatgacgtgaatggtcgtaccaagatgtataagaacatcgtggacggcaaccatcagatggaaccgggtatgccggaatccttcaacgttctgttgaaagagatccgctcgctgggcatcaacatcgaactggaagacgagtaattctcgctcaaacaggtcactggtgtcggggtaaaacccgacaccagattgtgctaactccgacgggagcaaatccgtgaaagatttattaaagtttctgaaagcgcagactaaaaccgaagagtttgatgcgatcaaaattgctctggcttcgccagacatgatccgttcatggtctttcggtgaagttaaaaagccggaaaccatcaactaccgtacgttcaaacctgagcgtgacggccttttctgcgcccgtatctttgggccggtaaaagactacgagtgcctgtgcggtaagtacaagcgcctgaaacatcgtggtgttatttgtgagaagtgcggcgttgaagtgacccagaccaaagtacgccgtgagcgtatgggccacatcgagctagcgtccccgactgctcacatctggttcctgaaatcgctgccgtcccgtatcggtctgctgctcgatatgccgctgcgcgatatcgaacgcgtactgtacttcgaatcttatgtggttatcgaaggcggtatgaccaacctggaacgtcaacagatcctgactgaagagcagtatctggacgcgctggaagagttcggtgacgaattcgacgcgaagatgggggcggaagctatccaggccctgctgaagagcatggatctggagcaagagtgtgaaactctgcgcgaagagctgaacgaaaccaactccgaaaccaagcgtaaaaagctgaccaagcgtatcaaactgctggaagccttcgttcagtctggcaacaagccagagtggatgatcctgaccgttctgccggttctgccgccagatctgcgtccgctggttccgctggatggtggtcgtttcgccacgtcagatctgaacgatctgtatcgtcgcgtcattaaccgtaacaaccgtctgaagcgtctgctggatctggctgcgccggacatcatcgtacgcaacgaaaaacgtatgctgcaggaagcggttgacgccctgttggataacggtcgtcgcggtcgtgcgatcaccggttctaacaagcgtcctctgaaatctttggccgacatgatcaaaggtaagcagggtcgtttccgtcagaacctgctcggtaagcgtgttgactactccggtcgttctgtaatcaccgtaggtccatacctgcgtctgcaccagtgcggtctgccgaagaaaatggcgctggagctgttcaaaccgttcatctacggcaagctggaactgcgtggccttgccaccaccatcaaagccgcgaagaaaatggttgagcgtgaagaagctgtcgtttgggatatccttgacgaagttatccgcgaacacccggtactgctgaaccgtgcaccgactctgcaccgtctgggtatccaggcatttgaaccggtactgatcgaaggtaaagctatccagctgcacccgctggtttgtgcggcatataacgccgacttcgatggtgaccagatggctgttcacgtaccgctgacgctggaagcccagcttgaagcgcgtgcgctgatgatgtctaccaacaacatcctgtctccggcgaacggcgaacctatcatcgttccgtctcaggacgtggtattgggtctgtactacatgacccgtgactgtgttaacgccaaaggcgaaggcatggtgctgactggcccgaaagaagctgagcgtatctatcgcgcaggtctggcctctctgcatgcgcgcgttaaagtgcgtatcactgaatatgaaaaagatgaaaacggcgaattcgttgcgcacaccagcctgaaagacacgaccgttggtcgcgccattctgtggatgatcgtaccgaaaggtctgcctttctccatcgtcaaccaggcgctgggcaagaaagcgatctccaaaatgctgaacacttgctaccgtattctgggcctgaaaccgaccgttatttttgcggaccagacgatgtacaccggctttgcttatgcagcgcgttcaggtgcgtccgttggtattgatgacatggtcatcccggagaaaaaacacgagatcatctctgaggcggaagctgaagttgctgagatccaggagcagttccagtctggtctggtaaccgctggcgaacgctataacaaagttatcgatatctgggctgcggcgaacgatcgtgtatctaaagcgatgatggataacctgcaaaccgaaaccgtgattaaccgtgacggccaggaagagcagcaggtttccttcaacagcatctacatgatggccgactccggtgcgcgtggttctgcggcacagattcgtcagcttgctggtatgcgtggtctgatggcgaagccggatggctccatcatcgaaacgccaatcaccgcgaacttccgtgaaggtctgaacgtactccagtacttcatctccacccacggtgcgcgtaaaggtctggcggataccgcactgaaaaccgcgaactccggttacctgactcgtcgtctggttgacgtcgcgcaggatctggtagtgaccgaagatgactgtggtacgcacgaaggtatcctgatgaccccggttatcgagggtggcgacgtgaaagagccgctgcgtgaccgcgttctgggtcgtgtgacggcggaagatgtgctgaaaccgggtaccgcggacattctggttccacgcaacacgctgctgcacgaacagtggtgtgacctgctggaagcaaactccgttgacgccgttaaagtgcgttctgttgtatcctgcgacaccgactttggtgtatgtgcgcactgctatggccgtgacctggcgcgtggccacatcatcaacaaaggtgaagctatcggcgttatcgcggcacagtccatcggtgaaccgggtacacagctgacgatgcgtacgttccacatcggtggtgcggcatcgcgtgcggctgctgaatccagcatccaggttaagaacaaaggtagcatcaagctcagcaacgtgaagtcggttgtgaactccagcggtaaactggttatcacttctcgtaacaccgaactgaagctgatcgacgaattcggtcgtaccaaagagagctataaagtgccttatggcgctgtcatggcgaaaggtgatggcgagcaggttgccggcggcgaaaccgtggcaaactgggacccgcacaccatgccggttatcaccgaagtgagtggtttcatccgcttcactgacatgatcgacggtcagaccattacgcgtcagaccgacgaactgaccggtttgtcttcgctggtggttctggattcggctgaacgtactaccggtggtaaagatctgcgtccggcgctgaaaatcgttgatgctcagggtaatgacgttctgatcccgggtaccgatatgcctgcgcagtacttcctgccgggtaaagcgattgtacagctggaagatggcgtacagatcagttctggtgacaccctggcgcgtattcctcaggaatccggcggtaccaaggatatcaccggtggtctgccgcgcgttgcggacctgttcgaagcgcgtcgtccgaaagaaccggccattctggcggaaatcgcaggtatcgtttccttcggtaaagaaaccaaaggcaaacgtcgtctggtgattacgccggttgatggtagcgatccgtacgaagagatgattccgaaatggcgtcagctcaacgtgttcgaaggggaacgtgtagaacgtggtgatgtgatttccgacggtccggaagcgccgcacgatattctgcgtctgcgtggtgttcatgctgtgacgcgttacatcgttaacgaagtccaggatgtataccgtctgcagggcgttaagattaacgataaacacatcgaagttatcgttcgtcagatgctgcgtaaagcgaccatcgaaagcgccggtagttccgacttcctggaaggcgaacaggttgaatattcccgcgtcaagatcgctaaccgcgagctggaagcgaacggcaaagtgggggctaccttctcccgcgatctgctgggtatcaccaaagcgtctctggcaaccgaatcgttcatctctgccgcatcgttccaggagaccacgcgtgtcctgaccgaagcagccgttgcgggtaaacgcgacgaactgcgcggcctgaaagagaacgttatcgtggggcgtctgatcccggcgggtaccggttatgcgtaccaccaggatcgtatgcgccgtcgcgccgcgggcgagcagccagcaacaccgcaggtcactgcggaagatgcatctgcaagcctggcagaactgctgaacgcaggtctgggcggttctgataacgagtaatcgttaaatggtggaggggtatttatccctccaccagcttcatgctggataccgaattccgggtcgcttgcctacaaggaaagaaaatgccagcgattatttcattaatctatttaatgtttagtcttttagtatttacaaaaaagataaccatttcaaacgttctgtccgcttttttattgtttctatcgttatatatacttcaccataaatcattacttatatttatttattgtcttattattattgtcgccaccgctattcttcatcgagtcaaaaccagcgcggataaaaaagccgtattttatttttcaatgccatgctggctcttggttttatctgtaattataaatattaatgaataaatgaattattttttcatgactcttgtttctcgtattattggtgaaaaatcattatcactggttatatgaataaattgtccagtttttgtattatattttgccatcgcacagggaagactattaccaccgttagccataacaaattttgcttttgtattacgataaagattgacgccaggaatggggtcttgaccgaatgtataaggcgttgggacaattacattatgtttgtttgagagccactttactaaaatcccgccaacgccatcaaccggcgtaataaaagtagagaatccacaatactcaaaattgaaattttttatcattgggtttgtttttttctgtaacattgattccaaatgtgactttaaatttatcccataaatctaagttattaaagtctattggctcgccattataaaatacctgctgttcatacattaaatgataaacctgttttattgattgtttacgcgggacattttaaattattaaatgaaggatttaattccattaaggtctttgtttgctcttattacaggaattataaatatgatgccatttctggaataaaagtaaagttaataaattatttatttaattgctcactggcagggtatttatgtatcctccggttaatgcttagtttagcatcttttagctgacagcgattgcaacgctaaaaaacatgtgctaataatcatcatgtaaaatatgtaatgaagtaagtatggagcatttaattgttatgatcccaccattaaatagatatgttcccgcgctttcaaaaaatgaattggttaaaactgttaccaacagggacattcagtttacaagttttaatggaaaagattatcccttgtgctttttagatgagaaaacccctcttcttttccagtggtttgagcggaatcctgctcgctttgggaaaaatgatatacctataattaacacagagaaaaacccctaccttaacaatatcattaaagcagcaacaattgaaaaagaacgtcttataggtatttttgtagatggtgatttttttccgggacaaaaggatgctttttcaaaacttgagtatgactatgaaaacataaaagtcatatatagaaatgatattgactttagtatgtacgataaaaaattatcagaaatttatatggaaaatatttctaagcaagagtccatgccagaagaaaaaagggattgtcatttactgcagctattgaaaaaagaattgagtgatattcaagagggtaatgattcattaattaaatcttacttactggataaaggccatggatggtttgatttttacaggaatatggctatgttaaaggctggtcagttatttttggaggcggataaggttgggtgttatgatttatcaacaaatagtgggtgtatatatcttgatgctgatatgattatcacggaaaaactggggggtatatatattccggatggaatcgctgttcatgtagaaaggatagatggccgtgcttctatggaaaacgggataatagctgttgatcgcaataaccacccggctttacttgctggattagaaataatgcatactaaatttgatgctgatccctattctgatggtgtatgtaatggaattagaaaacattttaattattctttaaatgaagattataattctttttgcgattttattgagtttaagcatgataacattataatgaataccagtcagtttacgcaaagttcatgggcgaggcatgtgcagtagcggaaatggcaataatcatgctattgaatacataaaatattggcataaactatcaagtttcggcgaaaaatatttgttgctcagttttctctactacaacaccactttaaaatcgcagtgctgttcagaacggagatatacggcattccttgtgaaatatgggagtaagaagagcttaaataatttaattggttattaaataacaattttatttatacagatatctgtcagattacatctggcttaaatttttgtcagcccagatgcgttttccatcaagtaacgttaccatcggcgtccggccgcaacacatttttccctgatgggttcgcccctgattcccgttgttctggggcatcattttatggacaaaaacgatcagcagacacggttggaagaggggccgccagcgaaattacagtcaggaacgctgcccgaaaacttcaagttcaccgctatttcgataatccagtggccagcccccggtcgtcagttactgatgaaggggtgaaggctgggcaataatgaggaagggatactttgccttggtcagcttccgttgctgacgatgacaaaataaaaaaacgggaggtcgataacaatctcccgtttttcgcattacgtactcgttcgtgaaatactaatgcgtttacatacgggttcaccgcgtttgcgaagcgcgccccagccaactgtcccagtctttccagacgggctgcaatccttgcgcgcttaacgcgcttgctactgtttcaggccgacgggcatcgtggggagaaaactgctccagttccggatgatcgtcagcgtagccgccgggctgcgtttttgagaaggcgctgacgttgttgattgccagaggaatcacatggtctcgaaaccacggcgattcgcgggtggagagtgataattcaatttccggcgccaataaccggaaagcgcaaatcgtttgcaccagttgcttttcatccatcacagatgcgggttccacaccgccagtacacggacgcagacgcgggaaggaaacagaatagcgactctgccagtagtgtttctgcatccacaacagatgctccgccaccatatagcaatccacccgccagttgtccgacagaccaattagcgcgccaagaccgattttgtcgatacctgcccggcctaaccgatccggcgtttccagccgccagaaaaagtcctgtttctttcccttcaggtgatgctgtgcatagattgcctcatgataagtctcctgataaaccatcacgccatcgatccccagtgttttgagctccgcatagttttcttgcgacaagggctggacttccatctgtaaagaggaaaattgacggcggatggtgggtaaatgacggcgaaaatagtccatgccgactttggcctgatgttcgccggtgactaacagcagatgctcaaagcccagtttacggatagcatcgcattccctttgaatatccacctcatccagcgttttacgcttaatgcggttgctcatcgaaaaaccgcagtaggtacagtcgttggcacagaggtttgagagataaagcggcacgtagaaactgacggtgttgccaaagcgttgtcgggtcagcctttgcgcccgctgcgctatcggttccagataatcggcggcggcgggggagagcagtgccatcaaatcatcccggctaagatgcgcggcgttcagcgcacgttccacgtcagcggcggttttaccattgatgcgcaggcgaatatcgtcccactccagttgccgccaacggtcggtgaaggttttcatgctaacgcctccagaaatccggtgagcgggctggtggcgttggcgtaggtgctacgattacccggcaccgcctgacgcgccagtactcccgcttctacagccaggcggaaagcggttgccatcattaccggatcgtccgccacggcaatcgccgtgttgaccagcaccgcatcagcgcccatttccagcgcctgcgccgcatggctgggcactccaatgcccgcatcaaccaccaccggcacggtggactgctggataataatctccagcatcgctttggtttccagcccctgattcgaaccgataggcgcgccgagcggcatcaccgccgcgcagccgacctcttccagccgcttgcacaacaccggatccgcgccgcagtagggcagcaccacaaaaccctgcttcaccagcgcctcggcggcttttagcgtttcgatcggatccggcagcagccagcgggcgtccggatggatttctaatttcagccagtgggttcccagcgcttcgcgcgccagttgggcggcgaagattgcctcttcggcggttttcgccccggaggtattgggcagcagcgtgacgcccgcttcaatcagcggcgccaggatagcgtcgttgtgctgacgtaaatccacgcgcttcatcgccagtgtcaccaactggctgccggaggcgcgaattgcctcgaccatcagttgcgatgaggcaaacttcccggtaccggtgaacagatgtgaatcaaacgttttgtcggcaatacgtaacatatcaaccccctgcaataacctgaaaaaacaggatctggtcgccttcctgcacgatttgctgctgccactgctcgcgcggcaggatctgctgattgagcgccagcgccgcgcccggtttaagctgattgagttgcgtgagcagctcactgacggtttgccctgcggcgcactgcatcggttcatcattgaactgaatctgcatgttgccctccgcagaccggacagccgctggcatgacgcagcgccaggctgcgccactggctggttttgccgtcaaacaggcgtagctctccgctgggcgtctcaataccgctgagtaatttgattgcctccagcgcctgcaaggtgcccatcacgccaacaaccggtccgacgataccggcggtacggcagttgcgttcaggctcgacatcgtccggccacaggcagcggtaacagccttgttcccacggtggtgtgaggaccattagctggccgccaaagccgacggcgctggcggaaattaacggagtgttgagcgccacacaggcggcgttaatctcctggcgcgtcgccatgttatcggtacagtcgagcactacgtcggcgtgtgctaccgcgtttttaagcacatcgccagtcagacgttgttgcaatacgatcagcttgctaccggggttgagctgcgccagccgtagttttgccgcctgcgccttcgggtgggcgatatcgtcggtggtgaacagaatttgccgctggagattgctcaagtgaacatcgtcatcgtctaccagcgttagtttgccgatgcctgctcccgccagatacagcgcggcaggcgaacccaatccgcctaagccgacaatcaatacatggctattgagcaacttttgctggccttcaatcgcgatatcgccgagcaggatctggcggctataacgcataaaatcatggtcattcatcgccgactcctgcgattgccagcagctctgcagtggcttcacgccagtctgcggcctgagtaatagcgctgaccacggcaatgctgccgacgccggtcgccagtaccgccggagcgcgttcaaggctgatgccgccaattgccacggtcgggtaatccgccagtcgttcaatatgactggccagctgcgccagcccctgcggggcggaaggcatctgcttggtttgcgtggggaagacatgacccagcgcgatataagaaggcttagcggcgagcgcgacgtctatctccatatcatcgtgggtcgatacgcccaggcgtaagcccgccgcttgaatcgctttcaggtcggtggtttcaaggtcttcctggcccagatgcacgccgtaagcgcggtgcttaattgccagacgccagtaatcgttgataaacagccgggcgttataacgacgccccagcgcgatggcggcgataacgtcggcttccacctcttcatcgcgtttatctttgatacgcaactggatcgtgcgcacgcccgactccagtaaacgctcaatccattcaacgctgtccaccaccgggtaaagcccgaggcggaacggcacggtggggaaatcaggctgatacatcaggcttcctcccgcttgagataaatttcgccgcctttggcgcggaagtcctctgacatatccgccatgccgatttcaatagtttgtgcggcggcgtagtcgcggacctcctggctgattttcatcgagcagaacttcggcccgcacatggagcagaagtgggcaaccttgccggactcctgcggcagggtttcatcgtgataagcgcgggcggtgaacgggtcgagcgcgaggttaaactgatcttcccagcggaattcaaagcgcgctttcgacatggcgttatcgcggatctgcgcgcccggatgtcctttggctaaatccgcggcgtgggcggcgattttgtaggtgattagcccctgcttcacatcttctttgttcggcaggccgaggtgttctttcggcgtcacataacacagcatcgcgcagccaaaccagccgatcatcgcggcaccgatcccggaggtgaagtggtcatagcccggcgcgatatcggtggtcaatggccctaaggtgtagaacggtgcttcatggcagctctccagctcttcggtcatgttgcgctggatcatatgcatgggtacgtggcccgggccttcaatcatcacctgcacgtcgtattcccaggcgattttggtcaattcgcccagcgtatgcagctcggagaactgcgcttcgtcgttggcatcctgaatggagccggggcgcaggccgtcgcccagcgacaaggagacgtcgtaggcggcgcaaatttcacaaatctcgcggaaatgttcgaacaggaagttctctttgtgatgggagagacaccactttgccatgatggaaccgccgcgtgagacaatcccggtcaggcgtttggcggtcattggcacgttgcgcagcagcacgcccgcgtgaatggtgaagtagtcgacgccctgttcagcctgctccagtagcgtgtcgcggaacgcttcccaggtaagatcttcggcgatcccgttgaccttctccagcgcctggtagatcgggacggtgccgatcggtaccgggctgttacgcaggatccattcgcgggtttcatgaatatagcgaccggtggagaggtccatcaccgtgtccgcgccccagcgggttgaccacaccagtttttccacctcttcttcgatggaggaggtgaccgccgagttaccgatgttggcattcactttgaccaggaagttgcggccgataatcatcggctccgattccgggtggttgatgttggcgggaataatcgcgcggcccgcggcgacttcatcacgcacgaattccggcgtaatgttttccggcaggcgcgcgccaaagttcatccccggatgctggtggcgcagcacttcactgcgaatgcgctcacggcccatattttcacggatggcgatgaactccatttcgggagtgacgatccccttgcgggcgtagtgtaactgggtgacgcgcttgcccgctttagcgcgttttggcgtcagcaggccggtaaaacgcagatcgtccaggccatcgtcggccagacgttctctggtataagccgagctacggtcgtctaattcttcgctatcgttacgtgcgtcaatccatggctggcgcagtttcgccagaccctgctggacgttaatcgccacctcaggatcgccataggggccggaggtgtcgtataccggtacggcttcgttctcttcaaactgcgggttgtctttactgccgccgatgagcgtggggctaagttgaatttcgcgcatcggtacgcgaatatcatgctgcgaaccggtcacgtagatgcgtttcgagttgggaaacgcggtgccttccagcgtatcgataaaatgctgggctttagcgcgctgctcgcggcgggttaacgttgttgtagacatagctcattccaaaaaattaaggacgtggcttgtcagacgacggatggagtaatggatgtgcgccgcccgtaaaggcagcagcataaagcagaattactcttgttcccttcgcaggtattaacctgatcaggttccgcggatcccgaattaacggtctcagccttttccacttcatccttcgcgctgcctcttcgttggcttcgtccgctcactccagtcacttacttatgtaagctcctggagattcaccgacttgccgccttgacgcatcacgaacgcttttgtggaaaattagcactccgacaagataaccgcccctccgaagagggggctgaagtaaactacccgttactcgcgcagaactcaagcgggacgtttgactctggcgccgtcgtgcatcgcgtcaaacaccagcataatcagcttgtcttccagcacaaagcgggcttccagcgcttcgccgatatctgacagagcttgttgaaattcgagacaattatcgtgatcgatggcagtttccaggctggtgtcgtaataatccataatgcgctgcgtattatcttccagcagcggccagatttttgccgcatgtaaaagctgaccgtttccttccaatttatggagaatacgttcataaatactgaagtgcccggcggaaaggtaatcgaccaggctctgacaaaaatcatccagcgctttttcattcagccgcatgtacgattctttgccaggcttaatgccaaccagattgtagtaagccacgagcaggtgcttacgtacatccagccagcgatcgaccagtttgttgcttccgccaacgcgctccgtcaggttttccagctggtttagcatgattgtctccgcaagttagataaaggctgctcgccatgaatgtaaaaataatgttaacaacatgccagtgaagcaaaggtagtgcaatagctatggatcgtataattgaaaaattagagagtggctggtggatcgtcagccatgaacaaaaattatggttgccgtatggggaattaccacacgggctggcggcaaatttcgatcttgtggggcagcgcgcactccggataggtgaatggcaaggcgagcccgtttggctggtgttacagcatcgacgtcatgatatgggatcggttcgccaggttatcgatcaggaggccgggttgttccaactggcgggacgtggcgtacagttggcggagttttatcgttcgcataaattttgcggctattgcgggcaccctatgcacccgagtaaaaccgaatgggcgatgctgtgcagccattgccgcgagcgttactacccgcaaatcgccccctgcattattgttgccattcgccgtgaggattccatcctgctggcccagcacgttcgccaccgcaacggcgtgcataccgtgctggccgggtttgttgaagtcggcgaaaccttagaacaggcggtcgcgcgagaggtaatggaggagagcgggattaaggtgaaaaatctgcgctatgtgacttcccagccgtggcctttcccgcagtcgttgatgaccgcttttatggcggagtatgacagcggcgagattgtcatcgacccgaaagaactgttggaagcaaattggtaccgttatgacgatctgccgctactaccgccaccgggcaccgtcgcgcgccgtttgatcgaagatacggtggcaatgtgtcgggctgaatatgattgacatgttacactgggcgcatcaacgctaaaggaatgtaaaaatgaccgaactcaaaaacgatcgttatctacgtgcgctgctgcgccagcccgttgatgttacgccagtgtggatgatgcgccaggcgggccgttatctaccggagtacaaagccactcgcgctcaggcgggcgattttatgtcgctgtgcaaaaatgccgaactggcctgcgaggtcactttacagccgctgcgccgttatccgcttgatgcggcgatccttttctcggatatcctgacgattccggacgcgatgggcctggggctctattttgaagctggggaaggcccgcgctttacagcccctgtcacctgcaaagccgacgttgaaaaactgccgattccggatccagaaggtgaactgggctacgtgatgaatgcggtgcgtacgattcgccgcgaactaaaaggcgaggttcctctgatcggcttctccggcagcccgtggacgctggcgacttacatggtggaaggcggcagtagcaaagccttcacggtgattaaaaagatgatgtacgctgacccgcaggcgttgcatctgctgctggataagttggcgaaaagcgtcacgctgtacctcaacgcgcagattaaagcgggtgcgcagtcggtgatgattttcgatacctggggcggcgtgctgactggccgcgattaccagcaattctccctctactacatgcataaaatcgtcgatggcctgctgcgtgaaaacgacggtcgccgggtgccggtaacgctgttcactaaaggtggcggtcagtggctggaggcgatggcggaaaccggctgcgacgcgctgggtctcgactggacgacagatatcgccgatgcgcgccgtcgcgttggccataaagtggcgctgcagggcaatatggacccctcgatgctgtatgcgccgccggcacggatcgaagacgaagtagcgactatacttgctggtttcggtcagggagaagggcacgtctttaaccttggacatggcatccatcaggatgtgccgccagaacatgctggcgcatttgtggaggcagtgcaccgactttctgcgcagtatcacaactaaggagttagcatggatctcgcgtcgctacgcgctcaacagatagaacttgcttcatcggtttgccgcgaagatcggttggacaaagatccgccagcgtttatcggcggggcggacgtcggttttgagcagggcggcgaggtgacgcgggcggcgatggtattgctgaaatatccgtcgcttgaactggtagagtacaaggtggcgcgtattgccaccaccatgccgtatatccccggctttctctcttttcgtgaatatcctgcgctgctggcggcgtgggaacagctctcgcaaaagcccgatttgctgtttgtggacggtcacggtatttcgcatccgcgtcggcttggcgtcgccagtcattttggactgttggtggacgtgccgaccatcggcgtggcgaaaaaacggctatgcggtaaatttgaaccactttccgccgaacctggcgcacttagccccttaatggataaaggcgagcaactggcgtgggtatggcgcagcaaggcgcgctgtaatccgctgtttatcgcgacagggcaccgggtcagtactgacagcgcgctggcgtgggtacagcgctgtatgaaagggtatcgcctgccggagccgacgcgctgggcggatgccgtcgcttccgggcgtccggcgtttgttcgttggcaagaaattcagcgctgattcaggtaaactgccgctaatttccgattcgagattccatcatgttacaaaacccgattcatttgcgtctggagcggctggaaagctggcagcacgttacctttatggcctgcttgtgcgagcgcatgtacccgaactacgccatgttttgcaagcagacggaattcggcgacggacagatctaccgtcgcattctggatctgatctgggaaaccctgacggtgaaagatgcgaaggtcaatttcgatagccaactggagaagtttgaagaggcgattccggcagccgacgactatgatttgtacggcgtttacccggcgattgatgcctgcgtcgcattaagcgaattaatgcattctcgtcttagcggcgaaacgctggaacacgctattgaggttagtaagacttccattactacggtagcgatgttggaaatgactcaggctggtcgggaaatgaccgatgaggagctcaaaacgaaccctgccgttgaacaggaatgggatattcagtgggaaatattccgacttttagccgactgcgaagaacgtgatattgaactgataaaagggctcagggcagacctgcgcgaggctggcgagagcaatatcggtataaattttcagcaatgacaccagaaaacgtgatttaacgtctgatttgtcgtgccataaggcttcccttatgccccccgtctggtctacatttgggaggcgaaaaaaagtggctatcggtgcgtgtatgcaggagagtgcttttctggcatttccgtcgcactcgatgcttagcaagcgataaacacattgtaaggataacttatgaacaagactcaactgattgatgtaattgcagacaaagcagaactgtccaaaacccaggctaaagctgctctggaatccactctggctgctattactgagtctctgaaagaaggcgatgctgtacaactggttggtttcggtaccttcaaagtgaaccaccgtgctgagcgcactggccgtaacccacagaccggtaaagaaatcaaaatcgccgccgctaacgtaccggcgtttgtttctggtaaagctctgaaagacgcagttaagtaagacgcataactgtgaacagttttatcgaaggggctcatcagccccttttgtctgtctggcgtcgcgcgtttctgttttctggcgcgctgttgctgactgcctgcagtcataacgcttcaccgcctccgtttactgccagcggctttgccggcgatcacggcgcggtgcgtatctggcgtaaagatacgaacgatgaagtccatctgctttctgtttttagcccgtggcatagcggcagcacgacgaccagcgaatatcgttggcagggtgatacgctttcgcttattgaactcaatatttacagcaaaccgccagaacatattcgcgcgcgtttcgacgctcatggcgaactcagttttatgcagcgtgaagtcggggggcagaagcagcagctttccaacgatcagattgccttgtatcgctatcgcgccgaacaaatccgtcagaccagcgacgccttgcgcctggggcgggtcatactacgccagggacgctggcacgccgaccatacggtaaccacctgtgaaggtgaaacgctgaaaccggatctggattcctgggcaataagccacattgagcgccgccagaaccactcatcggtagaggtgagcgtagcatggctggaggcgccggaaggatcgcaacttttgctggtggcgaattcagatttttgtcactggcagccgcaagcgaaaagcttttgatggaataccggatggcgaagccgccattcggcaaacatgctttaccagtttcccatacccatgtgaccgccgccgcgatgataaccgccgccatagccgccgcaaccgccatagcccattcctgcgccgcgtggtatgccagcctgcgccatcgcgacatcccgtttcacgcgttgctcatctaacttctggcctaatgactccatctctttggcaaccgcgttaattttcgcagtatccggcgaactggcggtcagtagcgcgttgtattcataacgtttggatatcagttgctggcgcagcgcgctggtctgcgtatagtaatcatcataaatcttctgcgccgtcgcctgctgttccgtagttaacgggctacctccctgttgccacataccgtcattgttgccccagtgatgcccggcgaaggcggcgccggagctcagggccaaaagagagagggcaattagcgcgatagctgatttattgttccgtttcattttgcgttctcctgttgctcatcttatcctctctcttgcatcttccgtgccaggtaactattccttgtcgggcagcgagttaacccgcttcaggcggcaaaaagcgagtaaaaatgactcgcataacccgcctggcgagtcatttttacccatccgtatccgaaagggtgtgcgacaacgcgcggttatgcggagcgaagaatggcatgatctctgcttaagtaaggaaaataaaaacgagccggggaagcctgtgagttttatacgattacataaagatgccgctgcaacgtggttgagtcgactgttacctgcggcgatcttcattctggtggggctattttccattatggtcattcgcgactatggccgtgagagcgctgccgccaggcagacgctgctggaaaagggaaatgtactcattcgcgctctggagtccggcacgcgagtaggtatgggaatgcggatgcatcacgcgcagcagcagacattgctggaagagatggcgggtcagccaggcgtgttgtggttcgccgtaacggatgcgcagggggtaatcatcactcatagcaaccctggcatggtgggcaaatcgctctattccccatctgaaatgcatcaactaaaccccgggccgcaggagcgttggcggcgtgtcgacgttgctgctaacggcgagacggtgcctgcgctggaaatttaccgtcagttccagccgcttttcggtatgagaggtcacggtatgagggggcacggcatggcgcgtagcgccaatgacgacgaaccagcgaaacaaactatttttattgcctttgacgccagcgagctggccgcgacacaggcaagggagtggcgtaatacgctgattgttttgtctgcgttagcggcggtgctgttggcaacgttactggcgtttttttggcatcagcgttatcagcgctcgcacagagaactgcttgatgcaatgaagcgtaaagaaaagctggtggcgatggggcatctggcggcgggcgtcgcgcacgaaattcgtaacccgctctcgtccatcaaagggctggcgaaatactttgccgagcgcacgcctgccggcggcgagtcgcatgaactggcgcaggtgatggccaaagaggccgaccgtttgaaccgggtggtaagcgaattgctcgaactggtaaagcccgcgcatctgacgctccagacggttaacctcaatgatattattactcactccctgaatctggtcagtcaggatgcccaaagcagagagattcagttgagattcacggcgaatgagacgcttaagcgtattcaggctgacccggacaggctgactcaggtgctgttgaatctgtacctgaacgctattcatgcgattggccgccagggaacgattagcgtagaggcaaaagaaagtgggaccgaccgcgttatcatcactgttaccgatagcgggaaagggatcgccccggatcagctggaggcgatttttacgccttattttacgaccaaagctgacgggacaggcctggggctggctgtggtgcaaaatatcatcgaacagcatggcggcgcgattaaggtgaaaagtattgagggtaaaggcgcggtctttactatctggttgccagtgatagcgagacaacaggattaacaagggtgatacgcggaaaaatcgatattctggttgtggatgatgatgtaagccactgcacgattttacaggcgctgcttcggggctggggctataacgtcgctctggcctacagtgggcatgatgcgttggctcaggtgcgtgagaaagtctttgatctggtactgtgcgatgtgcgtatggcggagatggacggtatcgccacgctgaaggagattaaagcgctcaatcccgccattccgattttgattatgacggcattttccagcgtggaaacggcggtagaggcgttgaaagccggcgcgctcgactatttaattaaaccgctggattttgaccgtctgcaggagacgctggaaaaggcgttggcgcatacgcgggaaacgggcgctgaattgccatcggcgtcggctgcgcagtttggcatgattggcagcagtccggcgatgcaacatttactgaatgaaatcgcgatggtcgcaccatcagacgccacggtattgattcacggagactccggcacgggtaaagagctggtggcgcgggcgctacacgcctgtagcgccaggagcgatagaccgctggtcacgctcaactgcgccgcgcttaatgaatcgctgctggagtccgagctgttcggacacgaaaaaggcgcgtttaccggcgcggataaacgtcgggagggacgctttgtcgaagctgacggcgggacattgtttcttgatgaaatcggcgatatctcgccgttaatgcaggtacgtttgctgcgggcgattcaggagcgcgaagtgcaacgcgtgggaagtaaccagacgatatctgtggatgttcggttaattgccgctacccaccgcgacctggcggaagaggtgagtgccggtcgctttcgccaggatctctattaccgcctgaatgtggtggcgattgaaatgccttctttgcgccagcgtcgggaagatattccgctactagcagaccattttctgcggcgttttgccgaacgtaaccgcaaagtggtgaaggggtttacgccgcaggcgatggatctgctgatccactacgactggccgggcaatatccgtgagctggaaaacgctatcgagcgggcggtggtgttgctgacgggagaatacatttctgaacgcgaattgcctctcgctattgccgcgacgccgataaaaacggaatacagtggtgagatccaaccgctggtggacgttgaaaaagaggtgattctggcggcactggaaaaaacgggcggcaacaaaacggaagccgcccgtcaattgggcattacgcgcaaaacgctgctggctaaactcagccgttagttttgctcacgctcaatggcgcgccagccaatgtcgttacggctgaagctgccgtcccagcggatgtcggtcatcagggcgtaagcgcgtttctgcgcctcagccacggtgtggcccagcgcggtggcgcacagtacgcggccgccgctggtcaacacgcggtcgtcatcggcgagtttggtgcccgcgtggaaaactttaccgtcagccacttcttccagcggcaggccgtggatctcgtcgccggtgctgtagctgcccggataaccgcccgcggcgatcaccacgcctaatgaagcgcgttcgtcccactcggaggttttctcatccagcttgccgtcgcaggcggccaggcaaagatccaccaggtccgacttcatgcgtagcatgatcggctgggtttccggatcgccgaagcggcagttgaactcgataactttcgggttgccctgcttgtcgatcatcagacccgcgtacaggaagccggtataggtattcccttctgccgccatgcctttcacggttggccagatgatccgttccatggtgcgctggtggacttcatcggtcaccactggagccggagagtaagcccccatgccgccggtgttcgggccggtatcgccgttgcctacgcgtttgtgatcctggctggtggccatcggcagcacgtgctcgccgtcgaccatcacgataaagcttgcctcttcgccgtcgaggaactcctcaatcacgatacggtggcccgcgtcgccaaaggcgttgcctgccagcatgtcatgaacggcggcttcggcttcttccagcgtcatcgccacgataacgcctttaccggcagccagaccgtcagctttgatgacgatcggcgcgcctttctcacgcagataagccagggctggctcaatctcggtgaaattctggtattccgccgtcggaatctggtgacgagcgaggaaatctttggtgaaggctttggagccttccagttgggcggccccttcggttgggccaaagatcttcagacccgccgcgcggaacgcatcgaccacgccaatcaccagcggcgcttccgggccaacgatggtcaggtcaatcttctcgtgctgggcaaagctcagcagcgccggaatatcggtgacgccgatagccacgttctgcaacgcgggctccagcgcggtaccggcgttacccggtgcgacaaaaacagtatcaaccagcggcgactgtgcggctttccaggccagcgcgtgttcgcgtccgccgttaccaatcactaatactttcatgtttcgctccattaatggcggaagtggcgcatgtcagtgaagatcatcgcaataccgtgttcgtcggcagcggcaatcacttcgtcatcacggatagaaccgccaggctggatcacacagctcacgccaacggcggcagcggcatcaataccgtcacggaacgggaagaacgcgtcggaggccatcgcggaacctttcacttccagaccttcgtcagccgctttaatgccagcgattttcgcggagtacacgcggctcatctggcctgcgcctataccgatagtcatgttctctttcgcatacacaatggcgttggatttcacgaacttggcgaccttccagcagaacagcgcatcgcgcagctcctgctcggtcggctggcgtttagagaccacgcgcagttcagcttcgctcaccatacccagatccctgtcctgaaccagcaggccgccgttaacacgcttgaagtccagacccggcacacgctgtgcccactgaccgcaggtcagaacgcgaacgttctgtttggcggcggtgattttcagcgcctcttcggttgcggacggggcgatgatcacttccacgaactggcgggagataatggcctgcgcggtttcggcatccagttcgcggttgaaggcgataatgccgccgaacgcggaggttgggtcggttttatacgcacggtcgtaagcgtcgagaatagtggtgctcaccgccacgccgcacgggttagcgtgcttgacgattacgcaggctggctcgttgaactctttcacacactccagcgccgcgtcggtatcagcgatgttgttgtaagaaagcgctttgccctgaacctgctgtgcggtggcaacggacgcttctttcacattttcttctatatagaaggctgcctgctggtggctgttctcgccatagcgcatatcctgcttcttaatgaagttcagattcagcgtacgcgggaagcgaccggcggcttctttgctttcaccgtggtaggccggaaccatgctgccgaagtagttagcgatcatgctgtcgtaggcggcggtgtgttcgaaggctttaatcgcgagatcgaaacgggtgtcgagggtcagagaaccttcgttagcatccatctctttaataatggcgtcgtagtcgctgctcttcaccacgatggccacgtctttatggttcttagcagcagagcgcaccatggtcgggccgccgatatcaatgttctctaccgcatcttccagcgagcagccttcgcgtgccacggtctcggcgaacggatacaggttaacgacaaccatatcgataggggcgatgtggtgctgttccataatggcatcgtcctggccgcgacgaccgaggatgccgccgtggacttttggatgcagggtctttacgcgtccatccatcatttccgggaaaccggtgtaatcggaaacttcggtcaccggcaggcctttttctgctaacaggcgggcggtgccccccgtagacagcagctccacaccgcgtgcggaaagtgcctgggcgaattcgatgataccggccttgtcagaaacactgagcagagcgcggcggactggacgacgttgttgcatggtaaatcccctggatttgacgattacagagagcgttagctgaatttttcgtgaaaaactcagctaacgccccttatggggtattctcattttgcggcgacattgtaacgaaaacgtttgcgcaacgctcgcgaatttttctttttaaattctggccccgcttttatccctgaaagatcatttgcagagtgagaagatccaggagatgaacgcgcattttgtggataagtctgtgcgtaaatgggtataaccaggggttttgctggggaatgcagcaaacagtcatttttctgcaatttttctattgcggtcagcagagaactccctataatgcgcctccatcgacacggcggatgtgaatcacttcacacaaacagccggtcggttgaagagaaaaatcctgaaattcagggttgactctgaaagaggaaagcgtaatatacgccacctcgcaacggtgagcgaaagccgcgttgcactgctctttaacaatttatcagacaatctgtgtgggcactcgaagatacggattcttgacgtcgcaagacgaaaaatgaataccaagtctcaagagtgaacacgtaattcattacgaagtttaattcattgagcatcaaacttttaaattgaagagtttgatcatggctcagattgaacgctggcggcaggcctaacacatgcaagtcgaacggtaacaggaagcagcttgctgcttcgctgacgagtggcggacgggtgagtaatgtctgggaaactgcctgatggagggggataactactggaaacggtggctaataccgcataacgtcgcaagaccaaagagggggaccttcgggcctcttgccatcagatgtgcccagatgggattagcttgttggtgaggtaacggctcaccaaggcgacgatccctagctggtctgagaggatgaccagccacactggaactgagacacggtccagactcctacgggaggcagcagtggggaatattgcacaatgggcgcaagcctgatgcagccatgccgcgtgtatgaagaaggccttcgggttgtaaagtactttcagcggggaggaaggtgttgtggttaataaccgcagcaattgacgttacccgcagaagaagcaccggctaactccgtgccagcagccgcggtaatacggagggtgcaagcgttaatcggaattactgggcgtaaagcgcacgcaggcggtctgtcaagtcggatgtgaaatccccgggctcaacctgggaactgcattcgaaactggcaggcttgagtcttgtagaggggggtagaattccaggtgtagcggtgaaatgcgtagagatctggaggaataccggtggcgaaggcggccccctggacaaagactgacgctcaggtgcgaaagcgtggggagcaaacaggattagataccctggtagtccacgccgtaaacgatgtctacttggaggttgtgcccttgaggcgtggcttccggagctaacgcgttaagtagaccgcctggggagtacggccgcaaggttaaaactcaaatgaattgacgggggcccgcacaagcggtggagcatgtggtttaattcgatgcaacgcgaagaaccttacctggtcttgacatccacagaagaatccagagatggatttgtgccttcgggaactgtgagacaggtgctgcatggctgtcgtcagctcgtgttgtgaaatgttgggttaagtcccgcaacgagcgcaacccttatcctttgttgccagcgattaggtcgggaactcaaaggagactgccagtgataaactggaggaaggtggggatgacgtcaagtcatcatggcccttacgaccagggctacacacgtgctacaatggcgcatacaaagagaagcgacctcgcgagagcaagcggacctcataaagtgcgtcgtagtccggattggagtctgcaactcgactccatgaagtcggaatcgctagtaatcgtggatcagaatgccacggtgaatacgttcccgggccttgtacacaccgcccgtcacaccatgggagtgggttgcaaaagaagtaggtagcttaaccttcgggagggcgcttaccactttgtgattcatgactggggtgaagtcgtaacaaggtaaccgtaggggaacctgcggttggatcacctccttaccttaaagaactgttctttgcagtgctcacacagattgtctgatgaaaagtaaatagcaaggcgtcttgcgaagcagactgatacgtccccttcgtctagaggcccaggacaccgccctttcacggcggtaacaggggttcgaatcccctaggggacgccacttgctggtttgtgagtgaaagtcacctgccttaatatctcaaaactgacttacgagtcacgtttgagatatttgctctttaaaaatctggatcaagctgaaaattgaaacacagaacaacgaaagttgttcgtgagtctctcaaattttcgcaacacgacgatgaatcgaaagaaacatcttcgggttgtgaggttaagcgactaagcgtacacggtggatgccctggcagtcagaggcgatgaaggacgtgctaatctgcgataagcgccggtaaggtgatatgaaccgttataaccggcgatttccgaatggggaaacccagtgtgattcgtcacactatcattaactgaatccataggttaatgaggcgaaccgggggaactgaaacatctaagtaccccgaggaaaagaaatcaaccgagattcccccagtagcggcgagcgaacggggaggagcccagagcctgaatcagcatgtgtgttagtggaagcgtctggaaaggcgcgcgatacagggtgacagccccgtacacaaaagcgcatgtgctgtgagctcgatgagtagggcgggacacgtggtatcctgtctgaatatggggggaccatcctccaaggctaaatactcctgactgaccgatagtgaaccagtaccgtgagggaaaggcgaaaagaaccccggcgaggggagtgaaaaagaacctgaaaccgtgtacgtacaagcagtgggagcacccttcggggtgtgactgcgtaccttttgtataatgggtcagcgacttatattctgtagcaaggttaaccgtataggggagccggagggaaaccgagtcttaattgggcgttaagttgcagggtatagacccgaaacccggtgatctagccatgggcaggttgaaggttgggtaacactaactggaggaccgaaccgactaatgttgaaaaattagcggatgacctgtggctgggggtgaaaggccaatcaaaccgggagatagctggttctccccgaaagctatttaggtagcgcctcgtgaattcatctccgggggtagagcactgtttcggctagggggccatcccggcttaccaacccgatgcaaactgcgaataccggagaatgttatcacgggagacacacggcgggtgctaacgtccgtcgtgaagagggaaacaacccagaccgccagctaaggtcccaaagtcatggttaagtgggaaacgatgtgggaaggcccagacagccaggatgttggcttagaagcagccatcatttaaagaaagcgtaatagctcactggtcgagtcggcctgcgcggaagatgtaacggggctaaaccatgcaccgaagctgcggcagcgaacgtatcacccaagacaactttacggagttgacgattgacggagcgaagcgacgtcaaagcgttcattaaagtcgagttggcttagggatacgttcgttgggtaggggagcgttctgtaagcctgtgaaggtgtgtcgtgaggcatgctggaggtatcagaagtgcgaatgctgacataagtaacgataaagcgggtgaaaagcccgctcgccggaagaccaagggttcctgtccaacgttaatcggggcagggtgagtcgacccctaaggcgaggccgaaaggcgtagtcgatgggaaacgggttaatattcccgtacttggtgttactgcgaaggggggacggagaaggctatgttggccgggcgacggttgtcccggtttaagcgtgtaggtgtgtgttccaggtaaatccggttcactttaacactgaggcgtgacgacgaggcactacggtgctgaagcaacaaatgccctgcttccaggaaaagcctctaagcatcaggtaacacgaaatcgtaccccaaaccgacacaggtggtcaggtagagaataccaaggcgcttgagagaactcgggtgaaggaactaggcaaaatggtgccgtaacttcgggagaaggcacgctgacacgtaggtgaagtgatttactcatggagctgaagtcagtcgaagataccagctggctgcaactgtttattaaaaacacagcactgtgcaaacacgaaagtggacgtatacggtgtgacgcctgcccggtgccggaaggttaattgatggggtcagcgtaagcgaagctcctgatcgaagccccggtaaacggcggccgtaactataacggtcctaaggtagcgaaattccttgtcgggtaagttccgacctgcacgaatggcgtaatgatggccaggctgtctccacccgagactcagtgaaattgaactcgctgtgaagatgcagtgtacccgcggcaagacggaaagaccccgtgaacctttactatagcttgacactgaacattgagccttgatgtgtaggataggtgggaggctttgaagtgtggacgccagtctgcatggagccgaccttgaaataccaccctttaatgtttgatgttctaacgtggacccgtaatccgggttgcggacagtgtctggtgggtagtttgactggggcggtctcctcctaaagagtaacggaggagcacgaaggttggctaatcctggtcggacatcaggaggttagtgcaatggcataagccagcttgactgcgagcgtgacggcgcgagcaggtgcgaaagcaggtcatagtgatccggtggttctgaatggaagggccatcgctcaacggataaaaggtactccggggataacaggctgataccgcccaagagttcatatcgacggcggtgtttggcacctcgatgtcggctcatcacatcctggggctgaagtaggtcccaagggtatggctgttcgccatttaaagtggtacgcgagctgggtttagaacgtcgtgagacagttcggtccctatctgccgtgggcgctggagaactgaggggggctgctcctagtacgagaggaccggagtggacgcatcactggtgttcgggttgtcatgccaatggcactgcccggtagctaaatgcggaagagataagtgctgaaagcatctaagcacgaaacttgccccgagatgagttctccctgagacttagagtctcctgaaggaacgttgaagacgacgacgttgataggccgggtgtgtaagcgcagcgatgcgttgagctaaccggtactaatgaaccgtgaggcttaaccttacaacgccgaagatgttttggcggttaagagaagattttcagcactgattccggattttcgggaacgaaagattttacgctgaggcaaggcggcaaatgaaggaaaggaaggagcatacagaagtatgtgactgactttgcgaatgcagccaacgcagcatcggtgtaaaagattcgtttctggcaacagaatttgcctggcggccgtagcgcggtggtcccacctgaccccatgccgaactcagaagtgaaacgccgtagcgccgatggtagtgtggggtctccccatgcgagagtagggaactgccaggcatcaaattaagcaaaaggctcagtcgaaagactgggccttttgttttatctgtggtctgtcggtgagcactctcctgaggaggagaaatccgccgggagcggatttgaacgttgcgcagcaacggcccggagggtggcgggcaggacgcccgccataaactgccaggcatcaaacaagtgaagaagcccgtccgtcaggacgggcttttttgcgtgtgcggtaactgtaaaaatgtaggcctgataagcgcagcgccatcaggcaacctgcaccgccggatggccgcttcgccttatccggcctacatgcacttatcagacagcgccgctactcacggataaattaaattcaataatggatacggtttcccaagatcgtcgacctccgaacgtcccgtcaccttgaatcccattttcttataaaatccaacagcttgtgtattttgctcgttaacattggttgtcaatcccggcgccagtgttaacgcatgttcaaccagaatcttaccgataccctgaccgcgcacgtccggatctataaacagagcatccatatgctcaccggtaagcagcataaaccctaccggctcatcctgatcggtcacggcaacccatagtggcgcttctggcagaaaatcgctcaccagttcttccagttcggcccgataagcgtttgacagaaaatcgtgcgtggcatcgactgagcgacgccagatcgcaatcagtttttccccttcctcatgccttgaacggcgaatgttaatcatcatcttcactccttttttgcttacttctattctaatgcaaatgctgtcgtgaaactttctcaccttgaacttgcagactcgacattcgcctgatttctgagtatcttcagctatctggatgtctaaacgtttaaacgtatgtcgtgaggttatcaggttatgccgattcgcgtgctggacgagctacccgccgtcaattttttacgtgaggagaatgtcttcgtcatgacgacttctcgcgcatcaggtcaggaaattcgcccgctaaaggtacttatccttaacctgatgccgaagaagattgaaacggaaaatcagtttctgcgtttgctatcgaactcgccattgcaggtcgatattcaactactgcggatagatgcccgcgagtcgaggaacacgccagccgagcatctgaacaacttttactgtaacttcgacgatatctgcgatcagaactttgatgggcttatcgtgaccggagcgccgctgggtctggtggagtttaatgacgtggcttactggccgcagattaggcaggtgctggaatgggcgaaagatcacgttacttcgacgctatttgtctgttgggccgttcaggccgcactcaatattctgtatggtatccctaagcagacccgtacagataaactttccggcgtctatgaacatcacatccttcatccacatgctctgttaacgcgtggttttgatgattcgtttctggcgccacactcacgctatgccgatttcccggcggcgctgatacgggattatacggatcttgaaattctggccgaaacagaagaaggggatgcgtacctgtttgccagcaaagataaacgtattgcgtttgtcaccggtcatcctgaatatgacgctcatacgttagcgggtgaatattttcgtgacgttgaggccgggttaaatccggaggttccgtacaactatttcccaaaaaacgatccgcaaaacataccgcgcgcaacctggcgcagccacggtaatttactgtttactaactggctcaactattatgtctaccagattacgccatatgatctgcgtcacatgaatccaaccctggattaatcttctgcttctgacgatcctaaagcgtttcagcatgttgaatcaggcaccttcgggtgccttttttatttccgaaacgcacctcatcatgtaattaaatttaatttatattgttatcaataggttaatgcataattaaattaaaaatggaaattgtttttgattttgaaatttaattgagtagtcttagttgtgttgaacgaaaagtgcacagtgatccttcgttcgcattggggatgtatctggatcaacaacgaggagctgcatgatgaatccacaggcaaccacaactgatgaattaacctttaccaggccgcaaggcgagctggaaaagcaagtcctgaccgctgaagcagtcgagtttttgacggagttagtcacccgttttacgccaaaacgcaataaactcctggctgcccgtatccagcaacagcaggatattgataacggtaagttgcctgattttatttcggaaaccacttccattagagaaagtaattggcagattcgtggtattccggcggatttacaggatcgccgagtagaaattaccgggccggttgaacgtaaaatggtgattaatgccctgaacgcaaatgtgaaagtgtttatggcggattttgaagactcgctggcgccggactggaataaagttattgatggtcaaatcaacctgcgtgatgcggtgaacggcaccattagctataccaacgaagccggaaaaatctatcagctcaagcccgatccggccgtattgatttgtcgtgtacgtggtctacatctgccagaaaaacatgttacctggcggggggaagccattcccggcagcctgtttgattttgctctgtactttttccacaactataaagcgctgctcgctaaaggtagcggcccgtatttttacctgccgaaaacgcaagcctggcaggaggcagcctggtggagcgaagtgttcagctacgccgaagaccgctttaacctgccgcgcggtacgatcaaagcgaccctgttgattgaaacgctgccggctgttttccagatggatgagattcttcatgcgctgcgtgatcatatcgtcggtctcaactgtggtcgctgggattatattttcagctatatcaaaacgttgaaaaatcacccggatcgcgttttgccggacaggcaggtggtaacgatggacaaaccgtttctgagcgcctactcgcgcctgctgatcaaaacctgccacaagcgcggcgcgttcgcgatgggcggtatggcggcgtttatcccgagcaaagacgttgaacgcaacaatcaggtccttgccaaagtgaaagcggataaagcgctggaagcgaacaacggccacgacggcacgtggattgcgcatcctgggttggcggataccgcaatggccgtctttaacgaggtactgggcgagcacaaaaatcagctgttcattacccgtgatgaagatgcgccgattaccgctgaacagttactggagccatgtgaaggcgaacgcacagaagcgggaatgcgcgccaatattcgcgtggcagtgcagtacattgaagcgtggatctccggcaatggctgtgtaccgatttacggtctgatggaggatgccgcgacggcggaaatctcacgaacctctatctggcagtggattcaccatgagaaaacactgagcaatggaaaacccgtaacgaaaacgcttttccgcgaaatgttggcggaagagatgcgggtaatccaggacgaactgggcgagcaccgctacagcagcgggcgcttcgacgatgccgcacgtctgatggagcaaatcaccacctcagatgacttaatcgacttcctcaccctgccgggctatcgcttactggcttaattcaccacataacaatatggagcatctgcacatgaaaacccgtactcaacaaatcgaagaattacagaaagagtggacacaaccgcgctgggaaggcatcacccgcccgtacagcgcggaggaggtggtgaaattacgcggctcggttaacccggaatgcacgctggcgcagctcggcgccgcgaaaatgtggcggctgttgcacggtgaagcgaaaaaaggctatatcaacagccttggcgcgctgaccggcggtcaggcgttgcagcaggcgaaagccggtattgaggcgatttatctttcaggctggcaggtggcggcagatgccaacctggcatccagcatgtatccggatcaatcgttgtacccggcaaactctgttccggcggtagtggatcggatcaacaacacttttcgtcgtgcagatcagatccagtgggcatccggtattgaacccaacgatccgcgctatgtggattacttcctgccgatcgttgctgatgcggaagccggttttggcggcgttctgaatgccttcgaactgatgaaatcgatgattgaagccggtgcagcggccgttcacttcgaagatcagctggcgtcggtgaagaaatgcggccatatgggcggcaaggtgctggtccccacgcaggaggcgattcagaaactggttgctgcgcgtctggccgctgatgtgatgggcgtcccgacgctggtgattgcgcgtaccgatgcggatgcggcagatctgatcacctccgactgcgatccctatgacagcggttttattaccggcgaacgcaccagcgaaggtttctaccgcacccatgcgggcattgagcaggcgatcagccgcggtctggcgtatgccccgtatgccgatctggtatggtgcgaaacctctacgccggatctcgaactggcgcgtcgttttgccgatgctatccacgcgaagtatccgggcaaactgctggcctataactgttcaccatccttcaactggcagaagaatctggacgacaagaccattgccagcttccagcagcagttgtcggacatgggttacaaataccagtttattaccctggcgggcatccacagcatgtggttcaacatgttcgacctggcgcatgcatacgcgcagggcgagggcatgaagcactatgttgagaaggttcaacaacccgagttcgccgcggcgaaagatggctacacctttgtttcccaccagcaggaagtgggtactggttacttcgacaaagtcaccaccattattcagggcggcgcgtcatccgttaccgcgttaacgggttccaccgaagaagcgcagttttgattgatgcccggtggcgctgcgcttaccgggcctacagatagcgtaggccggataagcgaacgcgccatccggcatgacgtggtgccggatgagggaaaaaaatgccgcgtggcctggaattactgattgctcaaaccatcctgcaaggctttgacgcgcagtatggtcgatttctggaagtgacttccggcgcgcagcagcgttttgaacaggccgactggcacgccgtccaacaggcgatgaaaagccgtatccacctctatgatcatcatgtgggtctggtggtggagcaactgcgctgtattaccgatggcaaaagtaccgacgcggatttccttttacgcgttaaagagcattacacccggctgttgccggattacccgcgcttcgagattgcggagagctttttcaactccgtttattgccggttatttgaccaccgctcgttaacacccgagcggttgtttattttcagttcgcaaccggagcgccgcttccgtactatcccgcgcccgctggccaaagacttctttcccgatcacggttgggagccgctgttgatgcgcatactcagtgacttaccgctgcgtctgccctggcagaataaaagccgggatatccgctatattatcgcgcacctgactgaaacactgggcgaggacgcgctacctcgctgccatgtccaggtggcgaacgagttgttttaccgtaataaagcggcctggctggtaggtaaattaaccacacctgacggtacgctgccgtttttattgccgattcatcgcactgatgagggggaactgtttgtcgatacctgcctgaccaccacggcagaagcgagcattgtgtttggttttgcccgctcttattttatggtgtatgcgccgctgcctgccgcgctggttgagtggttgcgtgaaatcctgccgggtaaaaccactgccgaactgtatatggcgattggctgccagaaacatgcgaaaaccgaaagctaccgcgaatatttatgttatctggctgaaagcgatgagaaatttattgaggcgcctggcatccgcggcatggtgatgctggtgtttaccctgccaggtttcgaccgggtatttaaaatcattaaagacaaattcgccccgcagaaagagatgtctgccgcccatgtgcgtgcctgttatcaactggtaaaagagcatgatcgcgtcggtcgtatggcggatacccaggagtttgagaatttcgtgctggataaacggcaaattgatccggcgctgatggcgctgttacgacaagaagcgccagagaagattaccgatcttggggaacatatcgtcattcgccatctctatattgaacgtcgcatggtgccgctcaatatctggctggaacaggtagaaggccagcagttgcgcgatgcgatagaagaatatggtaatgcgattcgccagcttgccgccgctaatattttccccggcgatatgttgtttaaaaactttggcgttacccgtcatggtcgcgtggtgttctacgactacgatgaaatttgctacatgacggaagtgaatttccgcgatattccgccagcgcgttatccggaagacgaactggccagcgaaccctggtatagcgtctcgccaggtgatgttttcccggaggagtttcgccactggctgtgtgccgatccgcgtatcgggccattgtttgaagagatgcatgccgacctgtttcgcgccgattactggcgcgcgctacagacgcgtattaaagaagggcatgtagaagatgtgtatgcctatcgacgtagacagcgctttagcgtgcgttacggcgcgatctcaagtacggcgaactcttcgtaaaccagttccatctccggcgaccaattaccctcgcgctcaaaaaaggcccggtgtgccgcttgccagtacgccaggctaagatcgccttcgccttccagtgcggcgagatcggcgctcatctcgttaaaacggatcagcctgagcgccagcgtgcgtatgacgcacacggcgtcgcctgtgccgttgagcacaatgtgatatgacccgggcgtgacagggggttgctctttctgatagctaaccagcgagctacaggtgccacgctttttaccggcgaccactagcgccgccagctcgtcggccagcgccggcgaatcaccgaaagaccaacagaaggcctgtgggtacttctcctgccagtataatttcaggctgctcatttcagcgagttccaccataggccagcgttacctctttcgccgctttaatcaccatggcgccaagttcggtgacgcgatcgtcggtaatgcgtgagcaggggccggaaatagagagggccgcaaacggttcgcggtgttcgtcataaatacacgaggccacgcagcgcagaccgagcgcatgttcttcgtcgtcaaaggaatagccgcgcttgcgtgtttgggcgaggtcatctttcagatgcagcggcgacaccagcgtcgcatgggtataagcgtgcaaccccttgcggtgcagcagactggtaacctgttcctcactgagctgtgataaaaacgccttgcccgcgccagaggcgtgcatgggcagcttgccgccaataggggcggacatgcgcatcaattgtgtgcactgcacctggtcgataataatagcctgatggtcgctctggtcgagtacggcaaggtttaccgtttcgccggagtcctccatcagcttgcgcaaaatcggatggacaatcgccagcagattacggctctgtaagaagctgctaccgacgataaacgcgtgtgcgcctacggcccaatggcccagctcaccaacctggcggacaaaaccctgctgctgcatggtggtgagtagacggtgagtcgtggaattaggcaaacccgcctgttgcgccagttcggtcagcgcgacgctgccgttggactcggcaatccactccagcagcttcagaccgcgagttaatgactgaacctgcccggttacgggtgcagtggtagcggcaggttttctcccgcgtttcgcgggaacaggggcaaccatggcagactcctttttctgtatcgtggaaatcattttcgttttattcaattataatgcaagagttcctgaactgatcggatgagtgacatcacaggatgcccgatagcgctgcgcttatcaggcctacgctttgggagccgccaaagtaatttgtagactgataaggcgcttgcgccgccatccggcaaagcgacagaagtgggtggcaagctgaacatgtctcatgttgcccgttgttctcttttccgccagcacgctttgtgccagtatggctcgttacgtggagcgttgtcgggagcgagtgtgagcagcaaagttgaacaactgcgtgcgcagttaaatgaacgtattctggtgctggacggcggtatgggcactatgatccagagctatcgtctacatgaagaagatttccgcggggagcgctttgccgactggccctgcgacctgaaaggcaacaatgacctgctggtcctcagcaagccggaggtgatcgccgctatccacaacgcctactttgaggctggcgcggatatcatcgaaaccaacacctttaactcgacaaccattgcgatggcggattaccggatggaatccctgtcggcggaaattaactatgcggcggccaaactggcgcgcgcctgcgccgatgaatggacggcgcgaacaccagaaaaaccacgctttgttgcgggcgtgcttggtccaactaaccgcacggcctccatttcgccggacgtcaacgacccggcgtttcgtaatatcaccttcgatcagctggtggcggcctaccgtgaatccaccaaagcgctggtggaaggtggcgcagatctgattctgattgagaccgtttttgacaccctgaatgcgaaagcggcggtgtttgcggtgaaagaagagtttgaagcgctgggcgttgacctgccgatcatgatttccggcaccatcaccgacgcctctggccgtacgctttccggccagactaccgaagccttttataactcgctgcgccacgccgaggcgctcacttttggccttaactgcgcactggggccagatgaactgcgccagtacgtccaggaactgtcgcggattgccgaatgctacgtcaccgcgcacccgaacgccggcctgccgaacgctttcggcgagtatgacctcgacgccgacaccatggcgaaacagattcgcgaatgggcggaagcgggcttcctgaatatcgttggcggctgctgcggcaccacgccggagcatattgcggcgatgagccgcgccgttgccggtttgctgccgcgccagctgccggatatcccggtcgcctgccgcctttccggcctggagccgctgaacattggcgacgatagcctgtttgtgaacgtcggcgaacgtactaacgtcaccggctcggccaaatttaaacggctgatcaaagaagagaaatacagcgaagcgctggatgtcgcccgtcagcaggtagaaagcggcgcgcagattattgatatcaatatggatgaggggatgctcgacgccgaagcggcgatggtgcgtttcctcagcctgattgccggtgagccggacattgcccgtgtaccaatcatgatcgactcctccaaatgggaggttatcgaaaaagggctgaagtgcattcagggtaaaggcatcgtcaactctatttcgatgaaagagggcgtggaagcctttattcatcatgcgaagcttctgcgtcgctacggcgcggcagtggtggtgatggcctttgatgagcaggggcaggccgatacccgcgcgcgtaaaatcgaaatttgccgccgagcctacaaaattctcaccgaagaggtgggtttcccgccggaagacatcatcttcgacccgaatatcttcgccgtggcgaccggtattgaagagcacaacaactacgcgcaggactttatcggcgcttgcgaagacatcaaacgcgagctgccgcacgcgctgatctccggcggcgtgtctaacgtgtccttctcgttccgcggcaacgacccggtacgtgaggctatccacgcggtattcctctactacgccatccgcaacggtatggacatgggcatcgtcaacgccggacagctggctatctacgacgacctgcccgccgagctgcgcgatgcggttgaagatgtcattcttaaccgtcgcgatgacggcactgagcgtttgctggatttggcggagaaataccgcggcagcaaaaccgacgaagctgccaacgcccagcaggcggaatggcgtagctgggacgtgaaaaagcgtctcgaatactcgctggtgaaaggcattaccgaatttatcgaacaggataccgaagaagcccgtcagcaggccgcccgcccgattgaggtgattgaagggccgttgatggacggcatgaacgtggtcggcgacctgttcggcgaagggaaaatgttcctgccgcaggtggtgaaatccgctcgcgtgatgaaacaagcggtggcctacctggagccgtttattgaagccagcaaagaaaaaggctccagcaacggcaagatggtgatcgccaccgtgaagggcgatgtgcacgatattggtaaaaatatcgttggcgtggtgctgcaatgtaacaactacgaaatcgtcgatcttggcgtgatggtgccagcggagaaaatcctcagaacggcgcgtgaagtgaatgccgatctgatcggtctttccgggctgattaccccgtcgctggacgaaatggtcaacgtggcgaaagagatggagcgtcagggctttactatcccgctactgatcggcggcgcaaccacttcgaaagcgcatacggcggtgaaaatcgagcagaactacagcggtccgacggtctacgtgcagaatgcttcgcgtaccgtgggcgtggtggcggcgctactctccgacacccagcgtgatgactttgtcgcccgtacccgcaaagagtacgaaaccgtgcgtattcagcacgcccgcaaaaaaccgcgcacgccgccggtcacgctggaggcggcgcgcgataacgatctggcattcgattgggaacgctacaccccgccggtagcccaccgtctgggcgtgcaggaggtggaagccagcatcgaaactctgcgcaactatatcgactggacgccgttctttatgacctggtcgctggccggcaaatacccgcgcattctggaagatgaggtggtgggcgttgaggcgcagcgtctgtttaaagacgccaatgatatgctggataaactgagcgccgagaaactgttgaatccgcgtggcgtggtgggcctgttcccggcgaaccgtgtgggtgacgacatcgaaatctatcgcgacgaaacccgtactcatgttctgacggtcagccaccacctgcgccagcagaccgagaaagtcggttttgccaactactgtctggcggattttgtcgcgccgaaactgagcggcaaagcggattacatcggtgctttcgcggtgaccggcggtctggaggaggatgcgctggcggacgccttcgaagcgcaacacgacgactataacaagatcatggtgaaagcgattgccgaccgtctggcggaagcgttcgcggaatatctgcatgagcgtgtacgtaaggtttactggggatatgcgccgaacgagagcctgagtaacgacgaattaatccgcgaaaactaccaggggattcgcccggcgccgggttatcctgcctgcccggaacataccgaaaaaggcactatctggcagctactggatgtcgaaaaacacaccgggatgaagctcaccgaatctttcgccatgtggccaggcgcgtcggtctccggctggtacttcagccatcctgagagcaaatacttcgcggtagcgcagatccaacgcgatcaggtgacagattatgctttccgtaaaggaatgagcgttgaggatgttgagcggtggctcgcgccgaacctgggttacgatgcggactgattcataaaatcgtcacttttccttacaacatacaaggcactcattgggtgccttgtctctttcttacaattaaacccttatactgaaggaaggctctacgctgaatttgccggatggcggcgtaaacgccttatccagcataccgtattacgtatggtaagcccggtggcgtgcaacgccagcaggccttaacgctttgcgccatcaggcaatttatcgcaagtgagcttcaggaaaacgtataacgataaggagaacctgacgccgtgttaactttgctccatctactttctgccgttgcgctgttggtatggggaacacatatcgttcgtactggcgtaatgcgcgtgtttggcgcgcgtctacgcactgtcctcagccgcagcgtggaaaagaaaccgctcgccttttgtgcgggtatcggtgttaccgcgctggtacaaagcagtaacgccaccactttattggtaacgtcgtttgtcgcccaggatcttgtcgccctgacgccagctctggtgattgtgctgggcgctgatgtgggtactgcgctaatggcgcgtattctcacctttgatttgtcgtggctgtcgccgctgctgatttttattggcgtgattttctttttgggacgtaagcagtcccgtgccgggcagcttggtcgcgtcggtatcgggcttggcctgattctactggcgctggagctgattgtgcaggcggtgacgccgatcactcaggctaatggcgtgcaggtcattttcgcgtcgctgacgggcgacattatgctggatgcgctgattggcgcgatgttcgctattatcagttattccagcctggcggcggtgttgctgacggcgaccctgacggcggcggggattatatcgttcccggtggcgttgtgcctggtcatcggcgccaatctgggatcggggctgctggcgatgctcaataacagcgccgccaatgctgccgcgcgtcgcgtagcgctcggcagcctattgttcaaattgatcggcagcctggtcatcctgccgtttgtccatccgctggcgaatctgatggatgagctatcgctaccgaaatcagagctggtgatctatttccacgttttctataacctggtgcgctgcctggcgatggtgccatttgccgagctgatggcgcgtttttgtaaacgaattattcgtgatgagcctgaactggatacccatctgaagccgaaacatctggatgtcagcgcgctggatacgccaacgctggcgctggccaatgctgcccgcgaggtgttgcgcattggcgatgcgatggaacagatgatggaagggctaaaaaaggtcatgcacggcgagccgcgtgaagagaaagcgctgcgcaagctggcggatgacgttaacgtgctctacaccgcgattaagctttatctggcgcgaatgccaaaagacgagctggcggcggaggagtcccgccggtgggcggagattattgagatggccctgaacctcgaacaggcgtcggatattatcgagcgaatgggcagtgagattgccgacaagtcgctggcggcgcgtcgggcattttcagaagaaggattgaaagagctggatgcgctttacgatcaactgctcagtaatctgcaactggcgatgtcggtctttttctccggcgatgtcaccagcgcccgtcggttgcgccgcagtaaacatcgcttccgtatacttaatcgccgatactcacatgcgcatgtcgaccgcctgcaccagcagaacgtgcaaagcattgaaaccagctcgctccatttagggctgctgggcgatatgaagcgtcttaactcactgttctgttcggtcgcctatagcgtactggaacagccggatcaggacgaggaacggggcgagtattaagtgaaatgccggatggcggggcctacggagaacatgcgcgtaggcccgtcattcggcattcaatatggcctgggattaaaagcgatgacccgcttccagcgccacggcctcttcgcccgctttaaacacccaggtggtattcgggccgccgagaaccgcctggccgttgctcacctgaatccagttaccttccggcaaaccaatcactgtcagttccggcgcgaccaccagcagttcgcgaatacgctgctcgcgggtctcgcccttatgaccttccggcaaggcgttagtgaagtgaggattaatttgcagcgggaacagatccagcgcgtcgaaaccgtttggatcgacgatcggcatatcgttggtcgtgcggatagtcgggcaggcaaggttggcgcccgcgctccagccgatatacagcgcgccgcgttttaccctgtccgccatcggcgccagcagcccgcgttcacgcgattctttcagtagctggaaggtatttccgccgccgacaataatgatttccgctttctcaatcgccgcaagcggatcggcgacacgatgaatccctgtgacgtttacccctaatggcgcaagcacctctgcggttttatccgtgtactcgtcccatgtttgcgtgacgccggcaaacggaataaacacggctgagcgtcgaccgttcaattgattcgctatcagcggcagagcgtgttccagccaggccttacccggcagcgtcgagttacttaataaaagcagttccattacttctccacctcatcaggaaatgtcaaaacgtaataatgctaccattatccatttaatgtcttactgatatggctcatgatgttacgcgtgtcacaggcaaagcgcggtcgctaaaagtgacgacaggccagatctgccatctggtatcgcctgaaaaattacaggtataatccgcaaaattatttaacacgtttagagacgaaaatggcaaaactgaccttacaagagcaactgctacaagcgggattagtgaccagcaaaaaaatggccaaagtccagcgcacggctaaaaaatcacgcgttcaggctcgtgaggccagagaggcggtggaagaaaataaaaaggcgcaacttgagcgtgataaacaactcagtgaacagcaaaaacaagcggttttagcgaaagagtttaaagctcaggttaagcaacttattgaaatgaatagaatcaatgtatctaaaggcgatattggttttaacttcaccgataataacgtcatcaaaaaaatagacgtggataagctcactcagacgcaactgattaatgggcgtctcgcgattgcgcgtctggttatcaataacagcggtgaatgtgaatatgcgattattcccgcgagcgtcgccgataaaatcgcacaacgagatgcggacagtattgtcgtaaacagtgcgctgagtcaggaagagcaggacgaagatgatccgtatgccgattttaaagttcccgacgatttgatgtggtaagtcacattcccgacgtttatgtagaaaaatttctcagagagtaaatatgctgaccgacacatctacccggcttaataaatatatcagtgaaagcggcatctgttcgcgtcgcgaggcggaccgttttatcgaacagggcaatgtctttatcaacggcaaacgcgccgccattggcgatcaggtagtcgcaggggatattgttaaagtaaatggtcggttgattgagccgcgagaagcggatgatttagtgctgattgcgctgaataaaccggttggcattgtcagtaccactgaagacggcgaacgcgacaatattgtcgattttgtgaaccacagcaaacgtatcttcccgattggtcgtctggataaagactcgcaggggctgatatttctgactaaccacggcgatctggtcaataagattctgcgtgccggtaacgatcacgaaaaagagtatctggtgacggtggataaaccgattaccgacgagtttattcgtggtatgggcgctggcgtgccgattctgggtaccgtcaccaaaaaatgtaaggtgaaaaaagaggcgccgtttgtctttcgcattaccctggtgcagggattaaaccgtcagatccgtcgtatgtgtgaatactttggttatgaagtgacgaaactggagcgtacgcgcattatgaacgtcagcctgagcgggattccgctgggcgagtggcgcgatctgacggacgatgagctgatcgatctgtttaaattgattgagcgttcctcttccgaagccaaaccaaaggccaaagcgaagccgaagaccacgggtattaagcgaccggtcgtggcgatcgaaaaaagcaatgagaaagcgcgcccgacatcaagcggtaagcgctttacctcgccgggacgaaagaagaaaggacgttaacgtctgccgcgcgtcggcgtattcgccgaccaggagaatgacgcttccgtatcgggtttatacgcctgcttcttcttcaactggcgggcttttttcgcttcagcctcacgcagcgccatcagcttatcgatgtactccttttttacgctgttggtctcagaattggtcagcggacgaccgtgtgcaatacgggcgcggtccagcaacgttttcagttcgcgctgttcgcgctcggtcatctctttttgggtaatgcgggggagtgccatacgggtgccctcagttagccgatgcatttagtctacggcaatacgcaacgggcggatagcgtgtaagccgggtaagcttgcgccacccggcaatattttaatttacctttgccgtttcgcccgatttttcaacaatcggtttcccggaccagtaaccagccagtagtgaccctgaaaggttgtgccacactgagaacagcgcgccaggcagcgctgcgagcgggccaaagtagattttacccaatgcagcagcaagaccagagttctgcatcccgacttcgatcgccagcgttcgacaggttgactcatcaaaaccgaacagacgtccaccccattagccgccaagcaggccaagggtgttatgcaggatcaccgcgatgatcaccataaagccgacggaggcgatatgtgaagctgaacccgcgaccaccgcgctgatgattgccaaaatgcacaccatcgagaatgctggcagataaggttttaccactttcactacgcgcggaaacagatggtgaatcaccaaccccagcgtgattggaatgaccacaatctgtagaatgctcagcagcatacccatcacgtcgacttgaatatgggcatcgacgtacaggcgcgtgagtagtggtgtggcgaccacgccgaccagcgtggagaccgatgaaatggtgactgagagcgcgacgtctcccttcgccagatagatcattacgttagaggcggtgccgctggctacgctaccgaccagtaccatcccggcggacagatctggcggcatcttaaacagcaacgccagcagccatgccgcgagcggcattaccagatagtgcaggaatatccctgcggcgacaggggctggtcgggagagcacgcgtttaaagtcgtcaacgttaagatggacccccataccgaacataatcaacatcagtagtgtcgcgacccacggcccaacaggagtaaaggtggatggtgtgtaatacgcagtgagagagagcagcagcgcccataacgggaacagccgggtaatgacggcgagcatgttgttttccttgcaagtatgttgtgtttgttatcaacgggtcaggatcgagccagaccatagttattgtttatcgcgtgaaggaagattattcaaacaaattacgctcatgatccagtgtgggcacgtggcaggctggatgacgcgcctgcgtcgccatccggcaacgtatcgcccgatggcgcttacgctaccgtattagaaatatatagaggttctggtggcgtaaagaaaagcgccggcattgaagagaaggaagctttaacgcagtgataacttatattgtttcactttgctttggattgtgttttttaaactaaagtaaggcacccagggcaatgctgtgttccaggggcgaggggaaccatgaaaacagactatgcttgctccgtcaggtaattttccattacctgtcccatcgtatagttcagggttaaaaccaatcatttttggtgttgctatattagctttgtaactaataattcttccgggtaagatgttttgccatctttcagcatcttgacatattctgccgataaatccttgatcgccatgatagggtggggttcttatggcattgatttccttttcaggatttttcataaattcatcccacacatttttttttgcgggtgcaggaataaacataatacctgttgctggcgcaactgaagcaccatgctgagaaaagtcattaagtaatgttatttttttcatagttgtcagaggagtaatatctcccacaataacgctatctatatcaatatagagaatatcctcattaccaagaacaggatgcagtggattgaaaagttctagttttgcccaccatcctggccaatcatacaaaagaggcgctgtatttaccccttttatctttagcgcatctgttaaacaaacagaatcataacctttgagctgcttatgtaaccattgagcatgttttgtggtgaagtctttgctttgtctgagcacagaaacaataatcattatattccccggtgaatattaggtgattttagccatgttccactatatttaatgtgctttatattgcaacaaaattagtgttcatatggttatcgaagttttattacattcaagatgtgaatgtaatttatttgtttataatgttattaatatatgtaatgtaagttgataaatgttttaatgattgttttgtcttttatattttcatggggatatataaaataagagttgggatgggagtgatcttatttcccctttttactgctcccagctctatatcaattccaaatttggaatttagcttgcgattaatccataatccagtttttttctgtttttttgaaccatagatatacatctcatttgccagacgccaccaaaataaaaaaattacgacggcgattgttattggcctgcataagtaatcgatataataaaaattcattactgcgaataatctcatgtcgccagtattcccgtaatccatttccttttttagatatggaaaataataagcaatgtaagagtttgattttttcttcctccaatgaagaaagctatcttgttaaataagtgttattatcgtagggggttcacgtatcaattggtaaaaatactataagatggttttttataatacttcatttgctatgcaaactgaacatttaatgctaacaaataataaagggtattattttaattcaacaccgccgggctttatacccggcgagagattcaacaatcgtattgccagctactgactaaggcataaaggtggctgggggagtagcgccagctatcgtttagtccgagaaattcagcgcaaaactcgctgcaaaacagtctatctttgcgctcccggttatacagcgcgataccgagcgcgccctgccagtcatagcgtttgccgttatgtttgcggaaaaagacttccacttccggcaacgtggcctttaacggtagcttatcccacttatcgtccggtaacggtattatctttccccgcacgccgcgatcgcgaaacgacgcggagtagcagaggtattcattaccgccgtgcgccaccgccagttcacagtgagagtagataccgcgcgtgactttgcgcgtgagccagtcggcaaacctggcgatgccgcgatgctccgatcgccccttatagcaggcgagccagacggtggtttgactcatggttgccagcctgtggagtagtcgtaatccagcaccgcttcgatatcctccagcgcctccaccgccgcaatatgccgctgcgcgttggcaaacaggcgcatatcgtgatccatagtgacggtttcaaactgcgcggcgatgtcgttggtcagttcaatcaaaccgttatttttggcctgccacattaaccctgccggaatctgctgtgcctgacccattctggtgagtgacatttgctgaatacggctgttagcatcgctgtggaaatggttgccgtcgataacgatataatcggcggtaacatcatcacggtgagctttgattgcctgtataacttgtgcttttacactttcaagtgctgagacaaataacgcttcgtcatatacccactcgtttccctgtaatcggtaaaattttccgggtggcggtgtagtaataaattcaagagggttaaggcacacccaacaatttttatctcttagtcgccactgctcatcatctatagaaattactgagtcaggtaacactacgtttaatgaagaagtatcaatccagtctataacctcaaaggttgccggatggtaatatgcatattgagtcatatattcaccatgagatttttacaaaaccgctagaaccgcgtccaccagcgtatcctgataaggctatatttaagctgttaaccgacgctccaccaccacctccagctccgtagccactcgcattgcttccgttagataaaactgcgccagttcctcctttcccaaagaaagtagtttcagcattaccacctgatatagagtccaactggttaaaaccgcttaaaggtattcttgactgaacaatgcctcccgctcctcctgccccccgttggcgacaacatctataaaaattgagtttccaccgttgatcccagaattcccagcctgtcctacttgcaccacgtttccagtagggttgctattaggtaatacaccaccagccccactagcgcccccagcccccacggttactggataattatttcccgcaataacggggacaatagcaatctctggctctccacttttgccagcattaccacctgaacaatagagaagaccatctgtattactcgtatgccctccacctccaccacctccaccgcctcctaacatttccacaaagacctgagtcaccccatcaggtaccgtaaacgtaccgttagccgtaaaaaactgataatgggaatgattagccggagccgctgcgctcgccttgtcatacgccgcctttaccgcgctcggcgtcgccgcctccgtcgtactggtgctgtcggtggcgttattaagcttcacgatccctttttgcgtcagcgtaccgtccggggcgccggtgatctgcccccaagcgtgtgtatgcctagccggagccgccgcactcgccttatccatcgccgccttgaccgcactgggcgttgccgcttcggtggtgctggtgctatcggtggcgttattaagcttcacaatccctttttgcgccagcgtgccgtccgggacgccggtaacctggttccagacgtgagtatggttcgccggagctgccgcattcgccttatccatcgccgcctttaccgcgctcggcgttgccgcttccgttgtgctggtgctgtccgtcgcactgttaagcttaacaatccccttttgcgtcagcgtaccgtccggaacgccggtaatctggttccaggtatgcgtgtgattacgcgcttccgccatcgccgcttttaccgcctttggcgtagccgctttggtttcgtcatcgctgtcggtggcgttactgagctgcgtaaagcctttctgcgttaatgtcgcatccgggtgatttgtcgaatgttcatgctcgtccagccgggtatccacatagtcgcgcgtcgccagcacgatgctcggatcgaccgtcagcgtcaccgccgtggtgttggagacttccataatcaggcggatacaaacctgcttgccacagccgcccggcagcagcggtttgtacgactcagggaatttgccgatggcgatcagctcgccctcgtcgtcgaacacgcccacttcacgcacataccagccgccaacgtcctccggcagcaccagttcggcaatcagccagttgggattattcggcgcaaccgtcagcgtattcatctcgccgcgccagacttcgtggcgtaatttggtctggctggcgatcggttcataatattgcccaccaccgtcgccaaccgccatcttttgcagatgtagctgttttttatccgcaagggcgctggcgattttcgccattcccctgtcggtcaggagggtataaaactcattatccataattactccgggtaaatagatgtaatttcaaggctccattgccctgtaccgaaatagatcggtttagtttgttgaacttccagaacctggaagggtaagacggtcgttatttctccaccgtaaagcgcgctgccaataacaggaatagcgctttggttaattatccagacaattaacgcttccagttttgaacgcacgttcttatattcatgaataagatcgaccagattattaaacagattttcatccatgccctggttgattagcttaatttcaaccttgaagaaataagccttaccgccatactcaaaccattcggaaatcgtgccgggtaaggataatatttccagtacgcggcgaacggcccagggggttcctttatatttatgcagttcaatcgcctgcttaattaactctcgtttctcctgttcattggcagcaaatagccagccttcgagcccctgtacatgaaactgttcggccaacgagggcaatgccgaggcatcaacgatatccaccagatagaccagcaacgccgtcaggtcgatttgcgcgaaacgttcggcggcaatgttcgccagaattgagaaacgttcgtcgctggccagcggcggcggcagaagcagtttatccatcgctgactccggcaatcgtcacgtcaatagccgtacattccgcccattcgtgcgcctgcaatacctttttcgcgggcatatccagcgcgacgtcgtaaacgccatccacttgtagcactttaattatctggtttggcacaatgtcctggcccagccgggtctggcgcgagcgcgtccatgtattaatcgcttcacgcgcggcggcaagcgtcgtctcctgatcggcggtggtaaacagcgtcagccgggcgctgatctgataagccacgcgcggagaacatttagcgctcaccttatcggttagcgggcgctttttctctttgctcacctcccgttcgatctgggcaagaagctccggccccggcagaccgttcagggtcagcggatagagttccacgcagccttccgccagcccttcatccggccccagtaccgccacgtcgataatcgactggctgaccgagagcgtatggaagcgataggcgccatagctgcccgcgttgctgaaactttccggcgctagctggatgcgtttacgtagcgcgtcgtcgttctcttcgccgcagccgccacttgaggccgtcagattggtgacgctgatatcgtaattgcccacgcggtctaccagcgcgctgatttgcgcaggctgccagttgttgccgggttcaccggtcactacacaggttgcagttaccgcaacgctcaggctgcccgcaggcaacagaacatcttcgtcggtggcgaacatcacgctatccgacgcgctggcgcgggtaccctgtggaatcaccaggttacttttagccgcttgagtaacagaaaactgcagcgtggtttttgccgcctgagcgggcagacggtgaacgccaaccagctcgcctaaataatccagcatcggcgcacgggaatacgcgaccaggttttgcttcgctgcctcctggatggcgatgcggacaaggttttcacgataagcaaacaggtcaatgagcagccgctcagcctgcgccgggtagagttttttaccgctggcttcttcatattgcgcaatcatctcgctggtgatttgcgcggggtcgcggtcaataaagtcgggttcggctatcgccataacacctccgttgagttaattacgccgtctgcggcgcgccattgcacgcgtaacgtcaggtgttcgccgtcaatcgtcggcgtcaccttcagcaaccggcagcgaggttcccacatgcgaatcgcttccaccgattcgcgaacaacgtgcggaatggcccgctcgatcgggtaatcgatgtagcgccacagattgctgccaaaaagcggcctgtggggatcgctgccgcgcggcgtgcgcagaatgatgtgtattgcctgatgaatatcatccagcccgcagacgtattcttcaggacgttgcaaggcaggttgccagtgcagggtcgagggtcgtgttttcgtgttcatgaggctattttcgccttccggcggggggagagatattaaagcgctttaaggaaataattgatggcggggtcagaatgtgttttgcccggtggcgcttctgcgcttaccgggcctgtgttgatgcacattttgttaaatggcgaagatcgcgttttacgtaaagttaaaatgaaattgctgtaatttcacctttgtctacagaagcgtagtaccagaattcatcattgatttctgcgtgcttcattttctcaactggaatcgttttctgccgtccattaaccgagagtgtgatcgaacccgttagctgctcccggctgataatagcgaaatccccgcgggtgttgctataagccgtcgtttcattggaaaggctgtgcttcgctccattagcgattacagaataatcaaaattgactttctttttgaaaatagcttgtacatgataatactcgccgtaaacagcaggatcatggaataaaccaaaatgaccaccgctattttgcaacttgacgaaataatagtcagggatgataaacttctgtttacctgccgctatttctttagtaatgattttttgtcttacgatttcctgtccggccgtttttttataaccgttaagcatcaatgaataggaccaaaggaatacgataccacagagaacagtcacggcagttacgccgacgactccagccttaacgccgcttttcaacagggcgtaagcgatgaaggagatagctaaaaggaaaaacataaacgtaccgttcataacccgatcggggtaggacggcgacgcgaacatgattaaggaagtgccaatacctatacatacgactaacgcagcgcagataagggacgttttatcaattttggcgcgaatctgcttattgaatatgaccagtaagaccagcaataacaaaacaacataagctatccagatcagcgccagatggttatgaacgcgttctgttaagtgaatgaaaatacgttcaaaaatcggccttccataccagaattctttgccgctggcgcggatgaaattgcccggagaaagtatcaatacgcatgaacctgcgattgcacagagactataaactatcttattgcgcgaaacagatttgttttgccataactcgtatgcaatggccagaacagaaataagcgagacgaaaggtgagacgctttcattggaacagcctgccataaagcttagtaatgcaacccacgggctgatcgctttactgttttttattgttatggtgtaaaagaagaacagccatgcaacaacgaacagattcgtccacaaataattcgcagcaccaacgatccagaaagtggtttgacccaaattcgggttcgaaatccagtaagtgaagaatattagtgggaataataagtagtcggatttattccagcgtaatgtacctgagggtgtcttcacaatgaaataacaaaataccagtgtcgaaacggctgcgctgatggaatacacgagttgagaacgtgtatacaggatgagtgcgctggtgtaatcagctataatcctgccactccatgtcatataatgatgaaaatgtgattccggcgaaattcctaaaaggtaatagcggtaatcatcagagtgaataggggtataccattcaataagaaaaatggccaaaaaagccagtagtatcatcgccgttttcggtaatatcttgagcatagtgttcattattccatcattgtttttttgtttttcacgatatagcggggtctttgcttcacctccgtgtaaacgcgtccgatatattcacccatgatgcctatgccgataagctggatgccgcctaagaagagaatcgcggtcataagcgaaggataaccaggaacagggtttccccacatcaatttatcaatgatcatccacatggcatatatcagggagagggcagaaacgctcactcctatatacatccagatacgcaaagggaaagtagaaaaacttgtaatcccctccagcgccaggttccagagtttccagccattaaattttgagttacctgcgacacgttcagcacgggcatattcgaccacatctgtttgacctccaacccatgaaagtatacctttcatgaaaaggttacgttctggtaatagcttgatattttctacaatctcgcgcgacatcaatcgaaaatcaccgacattctcttcaatctttggcgtactgattttgttatgcagcctgtagaaccactcagcgcttttacgcttcaggtggccatccgttgaacgatcgatacgcttagccagcaccatttctgcaccagcctgccatttattgatcaaatgtgggattacttcgatgggatcttgtaaatcaacatcgatagggatcaccacatctccggtcgcgtgatctaatccggcaaaaagtgcaggttctttaccaaaattgcgggtaaatgagatcggaacaacaagaggatcggcaacagctaatgcgctgatgattgattcagtcgcatcgtgactcccatcattaacgaagataatctcaacgttataaggtttaagtgaactgtattctctgaccgttttatagaaaatagggatcgcgtcctcttcattaaagacgggaaccactaatgaaattttcatttctcattcctgaaaacaatgaatctggaatataaaaatccgcaaataaggctaattgcggaaaatacaatgagcgtaaaaatgggaggcatagcacacttgtcgcctgtccatcccacgacggcgctcagcacgcccataaaaccgacgtacagcaaataacgtccggttgatacgctggctccaaaggtaaaccgggcgttagcgaaaaaactaaaactgacagcgacagcaaagcccgctacgtttgccaaagcctgacttgtttgaaatccatagacgcaaagggcaaagatagcccaatgcaaagcagtattaagtacgcctatcgaaacgtactttataaataattttatcattatagcaatcaagaagttgtaattcagcgaagtctaccagacaaaactgagaggatcattcctgaacagcagattttatgtaaacagggcgaagttaaagtaaaaaataacgctagttttccaatatacatatatgcaatatttgcagcgcaaagtgattacattttcatcggaaatagcgcgcgaaaagggactaatcacgttgcgctgaaaataaatatcctccagcaatttgcccggtggcgcttctgcgcttaccgggccggtgtttatgcaccttttgcaggctggataaggcgaagccaccatccagcagcaatttgcaggttagtgagagtggtggttagagttgccgccgttgtccatcagcgtgccgctggcgttaacgttgccgaggacattcacgttgcccgtaatcaccgcgctgtttccgacgccgccgctgcctgccataccgccaagccaggtgagttttttcatcacggtaacgtcgccggtaaaggtgctgagcggcgcatcgacggtgacattcagcgctttaatgcccgtatggggcgcttccacgttgacatctaccgccttgacgcccacggaggtggccgccacgtctacggtttctgatatcaccgtgacgtgctgcgccctgacctctacttgcggtgaagtaagctgcgtatgttccttcacttcaatgacgattttttctatgccgccgttgacggtgagctggtgtaacgcacggtcatattcaaaggccgcgccgtcggaaaactgcacgtagcgcttgtcgcgcgaggccagcggcgcggtatccacgctggagtagaccgcgcccagcaccaccccatcctcgccgttgtcgtcgagcgaaacttccacctgttcgccaatatccggcaaccagtaatctttgttgtcctgcgtgttgcgttgcagcaccgcaagccagttactgcgcaggttatcgcactccggtagagtgactctgacgcgcacgaccgcctcatcaatatcgctgataatacccgtctggcgggtaacgcctttcatattgcctccttactggctggttgccggtccgcgtgaaatgtcgatttcggtagtgtagccgccgctgcgcgtgagtttgtgcatggatttatcaatcagccactgcccggaaagtacgccaaaatcgctcagttctatcttgttgcccgccgtcaactgcgggcagcccatcaagctgagcgtgccggtctgctggtattcgttgtggctgtccagcgcggcattggctttagcctgcgccgcgccggtatccggagcgcgactgttgatcttcagggtatcggcgctggtcgccgcaccgcgcgccgaggtcttttcctggctatcatgggtataaataaccagttctttttgcttgctattttgatgctgcacggtggcgtttttgtagatccggttgatggtatctttgaacgtgtagtgcgaaacatccgtccgcctgagcgtcttcaccggcgccagacagcgcagcgtcggcagatgcgaaaagatcagctccgtcgccgtcactttcacggtatagccatattcactcgccagccgtttgagaaacgctacatcggtttcggcatattgcgtgacccgatcaatcgtcagcggcgcaatcttgcccgccagcgttaaaccgtgtttttgcgcgatgcgactggcgatggcggaaagcgtagtctcctcaaagccctggctgtttttggtgcgtagcgctttgctgaccgaggtggcgataccgtcgatattgaccgtcgaaggcggcgcgctgatatcaattttatcaatgacatagattccgcaatcgagcagatcttcgccctggtagcccaggcgcagcgccagcgtgtcgccttttcccggataccattcgtttacccagcgcccggtgctatcttccagcgcaatggcaatgacatccgactcgtttttaatactgtcgctgtaactgatgctggtgacataaggcgcgatgtcgtaagtgatctctttatgtccgtaccaaagggtaaaaatgggcgtcagggtggcgaacaccccgccggataccgttatctcagccatggcggtagctccggggtcgtttgcgtgacgctgataaccgggatgatcagccgcacgcctgacggtaaaaccggcataatagcgacgtgcggattggccgcgatgatgcgttcgtaggccagcgcatcgccgtaatagcgccaggcgagattatcccagcgttcgccgtcggtggtgacatgttcaaggtagcgcattacagactcctcgtaatatcggcagcggcaagctggctcacgtcaggagcgcttgtttgcagcgtgccgcgcgcctgattgaccagcgtcgcggcgctgtcgtaagtcgcttccgcgacgctgctggtgatagcgtcaaacagcgattcggcgtgttcgataagcgtgccggcatcgcccgcgcattcgcggatccccggcaggctgtcgatcagttcctgcattttcgccgccagcgctttcggcagcccggccagcgtttgcaaatccagcggctgctggaacagcgcgtctatcgaactcatggtttttttcagcgaatcgacgatatcgccgcatttttctttcagcgctttggcttccttcaccagttctttcgcctgggcgatcgtttttttgatgtcatcaatggcgtcggccacctcatccatcatctctttggcttcacgcataccctcttcaacgacgctcagcagttcatcgaaccaggaatcgttaacgtcgggaagctcatccaacatctcgtcaatgttcggttcctgggtggtgatggccggaggcagcagcgggctcttcggatcgccggtgtactcctgtagcgacaaactgccgccctgggcaatgacgttaccgtaaggatcggtgtgttggtgggtagcggtcagatcggtaatcacgaaccagccgcgataatcgccgttgccgaacaccagcgccatcgcctggtgcgcggtcatcgcttcccgcagacggttcagctcggtggtcggctggcaatactgactatgaaagttgaatttcagggtgattttgtccagcttatcgccgataaattgcacgcccggtttcccttcaatacgggcatggctggtgtaatccacgcccatcgtactttcaaattcgtcccagtaagcgacgacgtcaaattctatttcgcctaatacggcatacattatgcgtactcccggcgccgttgctgcgccatgacatcgttaatcattctctccagctcgcgtttgctcagcgacagcacgttgttgatatctttggcggcattcgcgccgcttccctgcacggtaacctgcggggaaaagtgtacctgcacgttgctttgcgcgcgggagggcagcgtataaggtttcccgccggatttgccgggaagcgcggctggcgtcggcggcgtggcggcgcttttcgtcttcacaggctgcggcgaggccatcgttttggccgaggttgtcaccgctttcgctcccgatgccagcggcgcgctggcctgttgcgcgaccattgttccggcaataccggggacggcggcggcgacagacggcatttcagcgctgatgcccagcgcgcttttcgcccagtcggggatcagcgcttttatcttctcaatcgccccgctcaggaaaggaagcgcattcagaatgccgttgatcaggctatcgagaatattgccgccaaattcgctgaaactggcggggagttcaatgccaaaccagtccagtacgccggcgaaggcgcggtaaaacaaccccagcggcgaccagtcgagaatcagacgcgtgacgccggcaatgcctccgtcaaaggcggttttgatgcgctcccagactccggcaaagaaaccggaaatcggttcccagtagcgataaagtaaataggcggcgcttgcgatagcggtgatagtcaggccgacagggttcatcagcagcgcccgacccagccagataaacgtctggccgaccagccgtagcccttttatcaggccgtttcccagcagcatcgtcaggcttttcgcaccgttgccaaacgatttcagaaccgacagcgcgcgactgccgccgcccagcgccagaccggctttgaccttcaggaagatatcgatcaggcgaataaacggtgacgcaatgaggtttgctcccagcctgagaatattcagcgccccgttgaacagccagataacgctaacgactttagcgaccccttgcaccagcgccggattttcccgcagccaggcgctgaactgccgcaccagcggcgtgatgctttgcgccagttcgccaatggcgggcatcagttccaggccgacggtcagccacagatcgttaagtgaaagttgtaacgctttggtctgttctccgggcgatgtcattttcgcggcgaagtcatcatcaataacatgttgccccgccgcctgcattgcggaggcttttagctggcgatattcgtccatattcgccagcatcggggcgagaaaatcccgcgtttgcgcatcgccgaacatcgcgccgaggttaaatttctccaccatggcctgtagcgcgtcgccgcgcgcggaaagatcctcaatcttcatggtttgcctgaaggtgtcgaggatctgcgggttcattttctccagttgcatctgcacgatgtgggtcatcgcttccgtcacgccgatcccattttgctgatgctccagcagcgatccctgaagatccacgccctggcgggcaaaccaactgtccgtctctttcgagaaggcggatttcaggaaatggtcgaaattcgctgccgccgcgcctgcgtcaggggcatttttcatggcgatttgcatcgttgcggtcagttccgcaatgccttctttcccctgagcgccggtttttccggcaaaggcgttaatccactgggtttgctctgcaacggagccgccgccgctttttgccacgctgtacagcatattttgcgcaaaacggaagtcgtcaggggcgatgttcagtttgtcgcgagtggccagagccgcctgcgcccagctttgcgcgctgtcgcgggaggcggtcgcggctttggcgatatcgggcatgtagcggctaagatcctgcaatgcgctgacgccgccttcgatcatcgtggcggcggtgctttgcagatctttttgatcttgattgaaatcaaggctccagtcgcggatattcaggctcagggcgtcccgcgcggtgttatccatgccgcccttcgccgccatatcgaccatgttgccctgaaattcgtaaggcagcttccagtcgggagtctcaacgttcaggagcttgccgagctgtccggcgaacgtttgtgttttttccagcaacccggcgcgctgtttatcgttctcttcccggcgaagggcggagttagcgagctgttgcgtaagccgggtgacttttgtttgctcaaagctgagcgtgtgcagcgtgctggcgttgagtgagccgtaacgggctattgcctgcgtcaacgtctcattacgcgcctgaagctgggtaataatgtcgttggccaaaatagtgtctcgtataagttgcccggtaacaggctgcttgccggaaaaaggacagggaaggagtgaaccgggcttgggtcaggaaacccgcaggcattaagcctgcgagtcgtattcgtgtttaatttgcgcgctggcttcgtccagccagcaggtaaaatcgtcaaccgacagcgcgtcaatttcactgggcggaaagcgaaaccacctcgccagcagcgccattgcctgccacagttgctgtgggttctgtagccatgctaagcatggactgaaatcgtttctgcaatgcctgatagtccagcagatccatttccgccagatcttcggttaccagcccggtcatagccgccatcagcggctcatcccactcttccggtttatcgctggcgcgtcgcgcggcgcgcatatcttttaccttcaggcgacgtaattgcagaacgtcgatacgttccccggcggcggaggtaaacgggaactgcagggtatatttttcgttcatggtatagtccttattcgtcgtgttaaattcggggccgtagccccgaagtaattaaccgccaatattattgcggtaggcatttaattgatccgcgccatttacgcggaaaatattcgccagataatccagttcaagaagcgtttcaccgtcaaccacctgtttaatataagtgcagccgaaggcgctgctgaattccgggttttcattctgtttaaacgttcccagcgggttctttttaaacattacggtcatatgcgtcaccagcgctaactgatccgctttaccctgcgagttataacaatcgatgctggagcggcactgcaatgccaccgcctgccacggatttgccgttttacgcatgacgtcgtggtaaaacgagttccatttaatttcaccttccagtttgtcaaaaccggcaggcagttcaattttaccgaccatccccagcgctttatgctcctgcataatcatgctgatatcaggcagtttaatttcactcgcgcgacctaaaagattattaccatcaagataaatattggcgttggtaatacggttaatttgaatttttccagccattagcgattgctctccagagaaactaaatattcagaggtaatttcggtttcaaacgtcagacgttccagcggcggcggcggggtgaatttgtagctcagcaacagatgcccggctgccagttcagtctgttcgttacgcgccgggtcgtaccagcattcaaagcccaacaacgcgccgtcggcaatcagcttgcggccccaggtgttcaccgattcggttagcgcgtcgatcagcgcctgattaatcggcatatccatgtattgctggctaaaatagcgaatcgattcgttaatcacatcaccagtacggcgcacgttctcaaagttacgcatatgagtaaccgtcggccaggcggcggtacggttgccccacaggcgcaaaccggagccatagctgttgaagatggtggtgatgccgttttcattcagttgattcacttcggtttgcggatcgtcgatcatcgctgacagcgagcgctctacgccggtaatgccctgaatttcctgattggagttgctccaccagaagcctttttccagatccactttggcacgcaggccagcggcgcgagaggagagcggctccaggacttcgctgttcgtcgcgctgtcgtacactttaacgtgcggatagcacagacgcgcgcgatcggaactggtattgaagttaatcgccccctgcggaccgcgccctgccagaacctgctggaaagtcgtgccgatgggcgcatcaatgtaggtaatggctcccagcgcttctgcctgagcgataagcttaacggcgaccgagttttgcgtacaaaagaccggcgcaatcaggatcttcgcgtaaaaaccaaactggttccaggtgtcctgtaacagcttcatgccggtacggtcacccgccgtgtttaccgcgccaacaatatcggcggcagtcactttggtggggtccgcgtaagtataatttacataggcctgaacgccgggtttcagattggtccccatgcaggtgattttaccggtcagcatatcaatggtgtaatcggtgcctttgatataagcgtttccggcgttcgtgctgcggccaatgttcatcgtttgcacggccccgtgcttgagttgaatctgaccgttgtcatcaaccttcacggtttcactgggaatggtacttttgtgtaccgccggattcagcacgttaatcaccacgaccgtccctgcgccgtgatcgtagatcgccttcagcgcctgcgggatggtgaaatttgccagacctgggccaaactgtgccgcgtcgctttcagaaaggcacagcgttggctggttaaccgggccgcatggcgcggtgccgatcagaccaataaccgcagatttaaccgccttaaccggacgtgggccggtttcgatctcaatggtctctacaccgtgcaggtaattagctgccatggacaatttcctcttcattagtttctacttcttgcgtaaccactggcaccaggtgacggcgggcaatcatggtgattacccactcgttatcttccggcagcgagatttcgctattgggccacagtaagacttcctgaccgtcggcgagcgtgacgccgcttgccgggccactgtagatatatttcattgaatttcctcataattaacgattgtcagcaggggggagtccttgctttcctgttccgcgataaacagggtgctggcggtcatatccagggcgtaacggcagaagtttgcggcgtcgccgatatatttttcgctttccagccagagcggacgatcacagtcgggaagttcaatgccccccaacgagcgacgtagacgatccagcgcgtttatcgcgtcacttatttgcggaacaataacggtggcggaaatccggattagttgtttttgtaccgtggcatccgtattttctggttcggcaaaaaccgaaccgcagtagtgaattaataccgttacctgctgtcctgttgggatatatactttcgcatcggttgatgaaatatgtatatccatatcagggtttaattcacgtagtctattcgccacggtatgtataacagataatgtttccatatacggttttccttgatttaccgggagagataatattctctcttcgttatcgttcagacgtattttgatgtatcaggcatcaggcgtcttttaatctcctttagagaaaaaagttaaaacaaataaaaaatccccggcgtataaacgacggggatttgtttaatggttacctcgttgaatcagttctattttgctatatagcgcatccagttttgcttccagaacggcctggccgcgaagataatcctcgcggcggacataatgcagcggtaaatcggcgcgaaattccagaaattctctctccagcctggaccagcccgcttctgattcgcgccgggcagcttccagtgcttcaaaacgttcattcagccgtttttcaatttgcgccagcagcaatttaccggcagcaaacattaatccaacaaacgaaagtaagagggagatgacttcccaaaaatcgatactgagtttcattactccctctgattaatgaatgcagctagcctgcccccattgcaaataacggggagcatgttggtataaaatcgctttggggtagtgacgattctcgcgccagtttgcggcgctgcgcccggcgttaacgcgttctacatgttcaaaccagatggacgcatccaacccctttgcggcggccagctttttatctctgttcacccagtcttgcccgccgttataggcgctcagagtgaaagccattcgctggcagctattttttgctaacacgcttttccacaactggcggtcatactgtaccagcgcgcgtatcgcccaggcgggattaaacggcttgttttcgtggagttccgggtacaactggctcacccattttgccgtcgcaggcataaattgcgccataccctgcgcgccagccggagaaagcgcgtcaggcgcccagccggattcctgatgtagttgcccggcaaaatcagcaacgggggcgttaagcccccagatttcgcgcgcggtacgaatcacttcgttgcgccattgcagggaagcgcgcggcggttcggcagcgtcggcagacaagaaagtcatagcgcagaccaggcatacgtattgataacgcatcgttacagccccagcgcgacggcaaggcaaattgccgcaacgatgatcgcgcgacgaatcatcgccgcggcgcagcacagcgattcttcccaggggcaaaaggagtcgggacgtgcccaggggaaaagactacggtcgagccagtaacccagcaccgctgataacgaaaccaggctgagtttatagatgacgaccggaatttgcgctgatgatgtccagccgataagcgcaaacagtacgacagaggcaaccagccagccggaaagtcggggaacaataatttttcgcatactctatctcctgataattgagagagaagtatcgcttttccccatagtggaagaacgaaaagggctttaataaataactttaaaaaatgtttagcgcatggcgtcaaatgccaacaaataaacgaataaataaagctttcggggcagggggtagaggttgcctgcggagagtcagtatgtgtctgtggcaggctacgatggcggtattgctgcgtcataataatctttgattaaaattatcttattgatttttaaagtcagtttaaaaattcacgcgattgtgaggaaagcaatctttttgatcgaacgcagaaaaaaatgcaaaaaattaactgtatatgcatacagtattgtgtaaaatgatgacatcagtgaaggcttacttcacctataaaataaatacatattataaattgaaaacgatatatatatttttttaatttataattaaatgcgttgatagtaaatatttatatatattttgaatgtattgataggtagttattgcaccgttttttacgcttccctttttggtgccgtcacggggagcatggtgctggatatggagataaaatatgattcagaaatcaaaagaaatggttcggcttccggagattattaacgatctggcgtttcatgcgtcgcaggtgcttattgaaagcatgaatattgatagcgcgtcagccgaaaatgccggtcaggcaattgctgacagaatgatgcgcaactggggcgggcaaagcatttattttcccaaaggtatctctggtcgggcttcggaacgggattatcagatttacagcgagtgcgatgggcgtaattatgcggagctggccaaaaagtacaatttgacactgcagtggatctataaaatcgttaagcgggtccacacggaaaaacagcaccagcggcgtatgctgtaagcgatatcgggtatggcgtatagcgcgacaagcgctatacgccgggagcagcgacaggccggataaggcgcctgcgtcgccatccggcagcgtattgcctgatagcgctcacccgctgccgtgtcagggcgattattcaaataagttctgatgtagtttttgcaccactttctcggcatcgtctcccggcacgaggaagcacagattgtggctggaggcgccgtaacaaatcatgcgaatgttgaacggttccaggacgccaaacacttctttaccaacaccgcaggcttttgacaggttgttgccaatcagcgcgaccagcgccagtccttcttcaacttcgacccgacacagcgcggaaagctccatcaataaggattgggtcagtaacgtatcgcccgtggaggtggagccggtagtatccagcgtcagcgcgacgctcacctccgaagtggtaatcagatctaccgaaatattatgccgcgccagaatgccgaacacctctgccaggaaacctcgtgagtgcagcatattcaggctgtgcagcgtcaatagcgtttgattgcggcgcagcgccagcgcgcggaacagcggcgggttttgggttttattgcacaccagcgtaccgcccgcttgcggatctttactggagccaacgaagaccgggatatcgctacgcacggccgggagtaaggtggctggatgcagtacttttgcgccgaaggttgccatctccgccgcttcttcaaagtcgatttcatcaattcgctgcgcgacaggcactacgcgcgggtcggtggtgtaaataccgggcacatctgtccagatatcaacccgcgcggcgtggagcgcttcagccagcaacgctgccgtatagtcgctgccgccgcggcctaacgtcgtggtgcggcctttgctttcactgccgataaagccctgagtaatgaccaacgtttcgctcaggcgcgggagcaactgctgcgcggccagttccgcaagcgctgcgacgtccggttccgcacgaccaaagcgatcgctggtacgcatcactttgcgcacgtcgaaccagtgggcctgtacgtcgcgttcacgcaggatctcaacaaatagcagggtagacatcagctcgccgtggctgaccagttcatcggtcagggctgccgatgtcgccagcgatgccgcctccgccagaatagtgatgttttccagcaggcgttcaatctcttcgcgaatgacattcggatgacgcagacgatcaaggatatcgaactggattttacggatggcgtcgagcgtagcgaaacgttcgccgggctccatcccttcggccagcgccaccagcaggttagtgatgccggcagacgcggaaagcacgactaaacgaacattggtgtcggaaagtacgatatccgcgctacggttcatggcgtcaaaatcagcgacgctggtaccgccaaatttggaaacaacgatctctgtcatatcaacctcgtgtcaggaaatgaaaaacgcgaccatggcacaagggcagaacagaaaccggtgcaggcgcaaatgcaagtaacgtatttataaataaaagttgtggcctggactgtcaacgttgggattatgcggattttttatgctgagtttaggctcagtaacagcgcttataaccccgatacccatttgccgcctttctgcacctcgaattatttagggtatatactttttatcctcattcgacagtgcctggggcaacggcactaaaacaatcacacttttctgtgactggcgttacaatcgatcccagtcacaattctcaaatcagaagagtattgctaatgaaaaacatcaatccaacgcagacttctgcctggcaggcgctccagaaacactacgatgaaatgaaagacgttacgatcgctgagcttttcgcgaacgatagcgaccgtttcgctaaattttccgcgacgtttgacgatctgatgctggtggatttctccaaaaaccgcatcaccgaagagacgctggcaaaattacaggatctggcgaaagagaccgatctggccggcgcgattaaatccatgttctccggcgagaagatcaaccgcaccgaagaccgcgccgtgctgcacgtggcgctgcgtaaccgtagcaatacgccgatcattgtggacggcaaagatgtgatgccggaagtgaacgccgtacttgagaagatgaaaactttctcgcaagcgattatctccggtcagtggaaaggctacaccggtaaggccatcaccgacgtggtgaacatcggtatcggcggttccgacctcggcccgttcatggtgaccgaagcgctgcgtccgtataaaaatcatctgactatgcacttcgtctctaacgtcgatggtacccacatcgctgaagtgctgaagaaagtgaaccctgaaaccacgctgttcctggtcgcgtcgaaaactttcaccacccaggaaaccatgaccaacgcccacagcgcgcgcgactggttcctgaaaactgcaggcgatgaaaaacacgtggcgaaacactttgctgcgctctccaccaacgccaaagcggtcggcgaatttggtatcgacacggccaatatgttcgagttctgggactgggtcggtggtcgttactcgctgtggtctgccatcgggctgtccattattctgtccgtcggtttcgacaactttgtcgagctgctttccggcgcgcacgcgatggacaagcatttctccaccactccggcggagaaaaacctacccattctgctggcgttgattggcatctggtacaacaatttcttcggcgcggaaaccgaagccattctgccgtatgaccagtatatgcaccgtttcgccgcctacttccagcagggtaacatggaatccaacggtaaatacgttgaccgtaacggcaacgccgtggattaccagacaggcccaattatctggggcgaaccaggcaccaacggtcagcacgcgttttatcaattgattcaccagggtactaaaatggtgccgtgtgattttatcgccccggctatcacccataacccgctatccgatcatcatcagaagctgctgtctaacttcttcgcgcagaccgaagcgctggcgtttggtaaatcccgcgaggtggttgagcaggaatatcgcgatcagggtaaagatccggcgcagcttgaacacgttgtgccattcaaagtgtttgaaggcaaccgcccgaccaactctatcctgctgcgcgaaattacgccgttcagcctgggcgcactgattgcgttgtatgagcataaaatctttacgcagggcgtcatcctgaacatctttactttcgaccagtggggcgttgagttgggtaaacagttggctaaccgtattctgccggagttgggcgatgataaagctatttcgtcccatgatagctctactaacggtctgattaaccgttataaagcctggcgcgcctgatggcactgcgcttatccggtctacgtaatgcatagcgtctgtaggccgggtaaggcgtttcgccgccatccggcaaaaagagaataagataataaaaaggccgatattcacatcggctttttttataagataattccgcttgtccgtctttatccccacagttttatattgagcttaatcctaaaataagcaataaccagaaaatcactctgcgttattttcagattatacggatgctgatgtcttttagtttaattttaacttattgattttatttgtttgttaattaaataatgtaggcgttacttctttaaagtttaattatcctaaaacttcgatgttatttctcccggacataatccgcctgctttggttgtgtatactcggtagcgcccgaaattcttttgggtaaatctccattcattcaatgaagggaagttatgatgaaaaaagtactgtatggcatttttgccataaccgcgcttgcggcgacatctgtctcggcagcccccgttcaggtgggtgaagcggcagggtcggcagcgacgtcggtatcggcgggaagctcctccgctaccagcgttagcaccgtaagttcggcggtgggcgtcgcgttagcggcaaccggcggcggcgatggttccaataccggaaccacgaccaccacgaccaccagtacccagtagtatcggtacgtttaaccataaccacactccggtgtggttattttgcccctctggagaagcgtcgtgaagcgactcgcacttatcctgatttgcctgctattacaggcgtgttcggccaccaccaaaggcctgggcgattcactgtgggacagtttgttcggtacgccaggcgtacagctaacggatgacgatattcaaaacatgccttatgccagccagtacatgcagcttaacggcggtcctcaactgtttatggtgctcgctttctcggaaaacgggcagcagaaatgggtgacgcaggatggcgcgacgatcgtgacgcagcatggccgtctggtcaaaactctgctcggcggcgacaacctgatcgatgtgaataatctggcgaccgacccgctggcgaaaccaggacagattatcgatggcgcgacctggactcgcaccctgggctggaccgaacatcgccaggtgcgttacgccaccgcccgttccgtttttacatggcgagggaccgatagagtgaacgtcggcagtgaggaaaccgccgtgcgggtgttagatgaagaagtgacgaccgatcaaacgcgctggcgtaatcgctactgggttgatagcgaaggccaaattcgccagacggaacagtatctgggcgcgaattactttccggtgaaaaccacgctgattaaggcggcaaaatcatgatgaaaaggacgataagcgcgctggcgctggcctttgtcgcgtcatccgcctttgccagcggcactgttaccgtttttacccagggtaatagcgagcctaaaacgctgacagacgctgagcgtctgctcgatttagtcggacagccgcgcctggcaacgagctggtggcctgcggcggtgataggcgaagaacaggcgaccgtgacggcgcgtcagcagcaacaggaacttctcgggcggctggcggtgctcagcgctgaggaagacggcgatgctgcggcggcgataaacacactgcgccgacagattcaggcggtgaaggtgacgggcagacaattcgtgaatcttgatcctgacgtggttcgggtgagcgaacgaggtaacccgccgctgcaaggtcactacatgctctgggtcggaccgcaacccacgcaggtgacgctctttggcttgattagccagccgggcagccagccgttcgtccctgggcgggacgtcgccagttatctcgaggatcagcgcttactcagcggcgcggatcgtagctatgcctgggtggtttaccctgatggacgcagccaaaaagcgccggtggcttactggaataaacgtcatatcgagccgatgcccggcagcattatttttgtcggttttgccgattccctttggcgcggcacgccggaggcgataaatgccgacattcttcataccctgacgcagcggataccggaataatgaaaaaaacacatctgctcagcgtgctggcgctgggtattagcgcggcctgccatgccgaaacatatccagcccctgttgggccttcacaatctgactttggcggcgtgggcctgctgcaaacgccgacagcgcgtatggcgcgtgaaggggagatgagcctgaactatcgcgataacgatcagtaccgctactactcggcttcggttcagcttttcccgtggctggaaaccacgttgcgctataccgatgtccgtacgaaaaagtacagcagcgtggaatcattctccggcgaccagacttacaaagataaagcgtttgatgtgaaactgcggttgtgggaagagagttactggatgccgcaggtggcggttggcgcgcgcgatatcggcgggacggggctgtttgatgcggaatatattgtagcgagtaaggcctgggggccgtttgatttttcattaggtctcggctggggctatcttggcaccagcggcaatgtgtctaatcctttctgttcgtatagtgataaattctgttcgcgtgataacagctacaaagaggcaggttccgtcgacggtagcgatatgtttcacggcccggcctcgctgtttggcggcgtggaataccagaccccgtggcaaccgctacgcctgaagctggagtatgaaggcaataactatcagcaggattttgcgggtaaactggagcagaagagcaagtttaacgtcggcgccatttaccgcgtcaccgattgggccgacgttaacctcagctacgagcgcggcaatacctttatgtttggcgttacgctgcgcaccaatttcaacgatttacgtcccgcgtatcatgacaattcacgcccgcaataccgaccacagccgcaggatgccatcctgcaacattcggtagtggctaatcaattaacgttattgaaatataatgccggtctggcggacccgaaaatccaggtcaaaggcgatacgctatacgttaccggtgaacaggtgaagtaccgcgactcccgtgaagggatcgtgcgcgctaaccggatcgtcatgaacgatctgccggaggggatccgcacgatccgcgtgacggaaaaccgccttaatctgccgcaggtcaccactgaaaccgatgtcgccagcctgaaacgccatctggaaggcgaaccgctgggacatgaaactccgctggcgcaaaaacgcgtggagccgatcgtgccagagagtactgaacagggctggtatatcgacaagtcgcgcgttgattttcatcttgatcccgtgctgaatcagtcggtaggcggcccggaaaacttctatatgtatcagttgggcgtaatgggaactgcggatctgtgggtcacggatcatctgctcaccacgggcagcgtgtttgccaatatcgccaacaactacgacaaatttaactacaccaatccgccgaaggactcgcatctgccgcgggtgcgtacgcatgtccgtgagtatgtgcagaatgatgtttatgtgaataacctacaggccaactacttccagtattttggcaatggtttctatgggcaggtctacggtggttatctggagaccatgtttggcggtgccggggcggaagtcctgtatcgcccggtagacagcaattgggcgtttggcctggatgccaactacgtgaaacagcgtgactggcgtagcgcgcaggatatgatgaagtttaccgattacagcgtgaagaccggacatttgaccgcatactggacgccgtcgttcgcccaggatgtgctggtgaaagccagcgttggtcagtatctggcgggcgataaaggcggtacgctggagatcgccaaacgcttcgatagcggcgtcgttgtcggcggttacgcgacgattaccgatgcgtcgccggatgaatatggggaaggggattttaccaaaggcgtatatgtttccgtgccgctggatatcttctcgtccggcccaacccgaagtcgtgcggcaattggctggacgccgctgacgcgtgacggtggtcaacagcttggccgtaagtttggcctgtatgatatgaccagtgacaggagcgtaaatttccgttaatactcaggccggataaggcgtttacggcgctatccggcaaattatcttattgaacaaaatataaacataaataaaaaatatagatgcccgtcacatttgtgcgttatacagaaacctcgccgcagagaaagagggggctgttatgatgccattatcgcgctcacgtcttgagtttatcgccacgattttacaaaacgtactaaatttggggctgcttaccctcggtctgatcctggtcgtttttctcggtaaagagacggttcatctggcggatgcattattcgcgcctgagcaagccagcaaatatgaactggtggaagggctggtgatctactttctttatttcgaatttattgcgctgattgtgaagtactttaagtctggccttcactttccgctgcgctatttcgtgtacattgggatcacggcgattgtgcgtctgatcattgtcgatcataaaacgccaatggatgtattactctattcggcggcgatcctcctgttggttatcacgttgtggttatgtaattcgaaccgactacggcgagaataggcgtcgccacaccgtaacggacgtatggcgtggcaataaattagccgctgtctataacgcataaaaaaagcgctccgaagagcgccaaaatacgaccataagtggggataacataacttgagggcagtggcattgcccgttgccgggcaggtacttcgataaaacttaacctttcacaccccctgccgtcaggccgttgaccagccaacgttgcgccaacaggaacaccagggtgataggaatagctgaaaggacggcggcggcggcaaagtcgccccacaggtagttttgcgggttgagatattgctgcatacccacggccagcgtatagctgtccacatcgcgcagtaacaacgaggcgaccggaacttcggtaatcgctgcgatgaacgacagaataaacaccaccgccagaatcggtacggaaagcggcagcagcaccaggcgaaacgcctgccacggggttgcgccatccagcgcggcggcctcttccagcgaactgtcgatagtttcgaagtagcctttaatcgtccaaacatgcagcgcgatgccgccaagataggcgaagatcacgccgccatgcgtattcagcccgataaatggaatgtattgtcccaggcgatcaaataacgcatacagcgctaccagagacaaaaccgccggaaacatttggaaaatcagcatccctttgagcagtgttgctttacctggaaaacgcattcgtgcgaaagcgtaggcgcaggtggtggagagcgccacgatgccgatggcggtaataccggcgattttcaccgagttccacagccacagcaggaccgggaagggaggcggcgttacccgaccatccgcatgttccacgctgaaacccagcgccagccgccagtgttcccaggagattttatccgggatcaggcttccggtggcgaagttcccttcacgtagcgagatagcgatgaccatcagcagcgggaacataatcgctgcgatgaaaatcagcagccccaggtgcgtgatgaggagacgcagtttctgagatttgggttggaccatagccattgttattatctcccttaatcaaacttcatacgcgtggctttcaggttcactattgccagcgcgcctaccagcaggaagatcagcgtggcaatggccgccgccagaccgaagtcctgaccgccgccgccttcaaaggcgatacggtaggtgtagctgacgagtagatcggtataaccggcaggcgtggtggtgccgagacggtctggcccgccgttggtcaataactgaatcaggacaaagttattaaagttaaaggcgaagctggcgatcatcagcggcgttagcggcttaatcagcagcggtaaggtgatcttaaagaaattctgaaatggaccggcgccgtccattgcggaggcttcgtacaggtcatccggaatcgctttcagcagtcccatgcacaggatcatcatgtagggatagcccagccaggtattcacgataatcaccattgcccgcgcggtgttggggtcgctgaaccaggcaggtttaatgccgaacagcgcgctcagcatcatattgatttcaccaaagctttggttgaataaccctttgaaaatcaaaattgaaataaacgacggtacggcgtagggcagaatcagcaggacgcggtagatagctttacctttcagcgcttcccactgtacgaggcaggccaataccatcccaaccgccacggttaacaccacagtgaggaccgaaaagaccacggtccagacgaagatagcgaaaaagggcttctggatcccttcgtcggtaaagacgcgcgtaaagtttttcgcgccgatagtaacggtataaccaggactgagtttttcatcaccccagcttccgtcggcgttgatcgactgataataaccgctatcgttgtttggccggtattttacgccgctctggttattggtcagcaggccgtcatcagccagtgtgtacagcggacgggtaccggaaaactgacgcagcgagctcataatcactttactttcatccggcaggacggcggttatctggttcaacgccagacggttctgggtgattattcgcagattggcgcgttcgccgcccggcagggcatcagtctctttcagctgtaatttttgttcgccgccgaaggaaaatgcgtcagacaggtaatgtttgcccgtttctccgtcggtgagggccagttgccactcgtcgccggtcgggtaaagaccgaagttataggtttttcctgcctgataagaacggtccatcagcacttgctgggcgcgttcaaaggtgagctggttggtgctgctgtagttagtaaaggcgatagcgatggtgcacaccagcgggaatagcacaaacagccccatgccggcgaggccagggtaaacgtagcgccaggcgtaggttttacgatttgcgaaaatatacaggccagcagagcttaaaatcagcgtcatgatggcgaacagatactccccttgtacgtacattaaaactacaaggtaacccaccagcaggcccagcagaccaattactgaccatttaagctggtcgctttgccaccagtgtttctttttaatgacatccatgggggttttcctctacagcgttgaaacttcctggccggagatgtgcctgatggcgctgcgcttatcaggcctacggtgtgttgtaggccggataaggcatttatgccgccatccggcacaggctcacggcattacttagtgatacggctttgtgcatctttcagcgcggcatccacggtttgacggccgctggcggcgttgatcacagccgtacgtaccgcataccagaaggcggacatctgcggaatattcggcatgatctcgcctttctgggcgttatccatggtggcggcgatacgggggtctttcgctaactgctcctggaaagatttcagcgccacggcgcccagcggtttatctttgttcaccgcttccagaccctgatcggtcagcaggtagttttcgaggaactctttcgccagctctttattcgggctggcagcgttaatccccgcgctcagcacgccgacgaacggtttcgagggtttacctttgaaggtcggcagcagggtgacaccgtagttgactttgctcttgtcgatgttcgaccatgcccacggaccgttgatggtcattgccgtttcgcctttattgaaggccgcttcggcgatggagtaatcggtatcggcgctcatatttttgttcttgatcatatcgatcaggaaagtcaggcccgctttcgcgccggcgttgtcgacaccaacgtctttcacgtcatacttgccgttttcaaatttgaacgcgtaaccgccgtcagcggcgatcaaaggccaggtgaaatacggctcttgcaggttgaacattatcgccgacttccctttcacttttagctctttatccagcgccgggatctcttcccaggttttcggcgggttcgggacgaggtctttgttataaatcagggagagggcttcaacggcgatggggtaggcgatcagcttgccgttataacgtaccgcatcccaggtgaacggatagagtttgtcctgaaacgctttatccggagtgacctccgccagcagaccagactgcgcgtagccgccaaaacggtcgtgcgcccagaagataatgtcaggaccgtcgccggtggctgccacctgcgggaatttctcttccagcttatccgggtgctcaacggtcactttaatgccggtgtcttgctcaaattttttaccgacctcggccagaccgttataacccttgtcgccgttgatccagataaccagtttaccttcttcaattttggcgagagccggggcggaaatcatcatcgtcgtaagtgcggataatgcgaggatgcctacgccagttttaatcttcatatctcccatcctttttggtgatgtacacagaggtggtttaacggtctctagtttctttatacgacaacctctttccatcctccccgcccctacgccccaccccggctttatgtgatctgtgttgcataaatgtgagtaatgcgtgctggcgcacacaaaaacacgccgatttttgcgggcggcatcacgaaattccttttctgtccgcgcccgtggtctcaggtgttgtgtcctcatcctcccgcctcctcccccataaaaaagccggggggtggaggatttaccccagtcagggatcgcgcatagtcaggccatcatgaatgttgctgtcaatgacaggttgtaacgaagggagaagggcatggcgagcgtacagctacgaaatgtaacgaaagcctggggtgacgtggtggtatcgaaagatattaacctcgatatccatgacggggagttcgtggtgtttgtgggaccgtcaggctgtggtaaatcgaccttgctgcgtatgatcgccgggcttgaaaccatcaccagtggcgacctgtttatcggggaaacccgtatgaatgatattccgcctgccgagcgcggcgtgggcatggtattccagtcttatgcgctctatccccatctctccgttgcagaaaacatgtctttcggcctcaagctggcgggcgccaaaaaagaggtaatgaatcaacgcgtcaaccaggtggcggaagtgctgcaactggcgcatctgctggaacgtaagccaaaagcgctttccggcgggcagcgtcagcgcgtagcgattggccgcacgctggtggcggagccgcgtgtgtttttgctggatgaaccgctctctaacctggatgccgcgctacgcgtgcagatgcgcattgaaatttctcgcctgcataaacgtctgggccgcacgatgatttacgtcacccacgatcaggtcgaggcgatgaccctggccgacaaaatcgtggtgctggacgccggtcgcgtcgcgcaggtcggtaagccgctggagctgtaccactatccggcggaccgttttgtcgcgggcttcatcggctcgccgaagatgaacttcctgccggtgaaagtgaccgccaccgcgattgaacaagtccaggtcgaactgccgaatcgccagcaaatctggctgccggtcgaaagtcgcggcgtgcaggtcggcgccaatatgtctttaggcattcggccggaacacctgctgccgagcgatatcgccgatgtcaccctggaaggcgaagtccaggtggtcgagcagttagggcacgaaacacaaattcatatccagatccccgccatccgtcaaaacctggtttatcgccagaatgacgtggtgttggtagaagagggcgccacattcgctatcggcctgccgccagagcgctgtcatctgttccgcgaggatggcagcgcatgtcgtcgtctgcatcaagagccgggtgtttaaggcctccataaaaaaacgaaacgcaaaaccattcgcagttttagaaggtggcagcgtttaaagaaaagcaatgatctcaggagatagaatgatgattactctgcgcaaactcccactggcggttgctgtcgcagcgggcgtaatgtccgctcaggcaatggctgtcgatttccacggttacgcccgttccggtattggctggacgggaagcggcggcgaacaacagtgtttccaggcaacgggtgcccaaagtaaataccgtctcggtaacgaatgtgaaacctatgcggaactgaaactgggccaggaagtgtggaaagagggcgataagagcttctatttcgacaccaacgtcgcctattcggttaaccagcagaacgactgggaatcgaccgatcccgccttccgcgaagcgaacgtgcagggtaaaaacctgattgaatggctgccgggctctaccatctgggccggtaagcgcttctatcagcgtcatgacgtacacatgatcgacttctactactgggatatttcaggtcctggcgcaggtatcgaaaatatcgatctgggcttcggtaagctttcactggcggcgacccggtctactgaagcgggcggctcttacaccttcagcagccagaatatttatgatgaagtgaaagataccgctaacgacgtctttgacgtacgtctggctggtctgcaaacgaacccggacggcgtactggagctaggcgttgattacggtcgcgccaatacgaccgatggttataagctggctgatggggcatcgaaagacggctggatgttcaccgccgaacacacgcaaagcatgttgaaaggctataacaagtttgtcgtgcaatatgccaccgatgccatgaccacgcagggtaaaggccaggcgcgcggttccgacggttcttcatctttcactgaagaattgtctgatggaaccaaaattaattacgccaataaggtcatcaataataatggcaatatgtggcgtattttggatcatggcgccatctcgcttggtgataaatgggatttgatgtacgtcggtatgtaccagaatatcgattgggataataacctgggtactgagtggtggaccgtgggtgtacgtccaatgtacaagtggacgccaatcatgagcaccctgctggaagtcggctacgacaacgtgaaatctcagcagaccggcgatcgtaacaatcaatataaaatcaccctggcgcaacagtggcaggcgggcgacagcatctggtcgcgtccggctatccgtattttcgccacctacgcgaaatgggatgagaaatggggctatatcaaagacggcgataacatttcccgttatgccgcagcgactaactccggcatttccaccaacagccgtggcgatagcgatgagtggaccttcggcgcccagatggaaatctggtggtaatacgatggtcatctgacgtaacgaggggcgcaagcccctcggaaacatcaggtctgatgatgcttgtaagccgaataaggcgccagccgccattcggcgatatgtttgggttggcgcgctattgcctggctaccgctgaacccgccttattgaggtgagaataatgaaaatgaagaaaagtctcgtcgccctctgtttaaccgcagggctgttcgccagcgtgccgggtatcagcctggcggaagtgaactatgtaccgcaaaataccagcgccgcgcccgttattcctgctgctgcgctacagcaattaacctggacgcctgtagatcagtcaaaaacgcagtctacccaactggcgactggcggccagcgccttgacgtcgccggcattaccggcccggtcgccgcttatagcgttccggcgaatatcggcgagctgacattaactctgaccagcgaggtcaataagcaagccagcgtttttgcgccaaacgtgttgattcttgaccaaaatatgacgccttcggcgttcttccccagcagttactttacttatcagcagccgggcgtcatgagcgcagaccggctggaaggcgtgatgcgcctgacgcctgcgttggggcagcagaaactctatgttctggtgtttacgaccgaaaaagatcttcagcaaaccactacgctgctcgatccggcaaaagcctatgccaaaggcgtcggtaactctatcccggatattcccgatccagttgctcgccataccactgacggcgtggtgaaactgaaggtgaaaaccaacagcagctccagcgtattggtcgggccgttgtttggctcgtccggtaccgggccggtaacggtaggcaataccgccgcgccggtcgctgcgccagcgccagtcgcgccgaagaaaagcgagccgatgttgaacgatacggaaagctactttaataaagcgattaaggatgccgtagcgaaaggcgacgtcgataaagcgctgaaactgcttgatgaggccgaacgtctgggatcgacatctgcccgttccacctttatcagcagtgtaaaaggcaaggggtaattatttccccacagtgctgattttgcagcaactggtgcgtctcctggcgcacctttttttatcatttcatgcgaattgttatttttttgttgcgcaacagatcacttaattgtgattgcgccccccgtaatgtcttttctgagatacaatgactttaggttatgaatcggagagtaaggcatgtcacaccctgcgttaacgcaactgcgtgcgctgcgctattttgatgcgattcctgcgcttgaaccccatttgctggactggctgttgctggaagattctatgactaaacgttttgagcagcagggaaagcgggtaagcgtgacgctgattcgggaagcgtttgtcggccaaagtgaggtcgaggaagcatcaggtttactgccatccgagtcccgctactggttacgtgagatactgctttgcgctgacggcgagccctggcttgccggacgtaccgtggtaccggaatccacgctgtgcggacctgaacaggtcttacaacatctgggtaaaaccccgcttggacgttatctatttacatcatcgacactgacccgcgattttattgaaattggacgcgatgcaacgctgtgggggcgccgctctcgactgcggttgagcggaaaaccgctgttgcttaccgagctttttttacctgcatcgccgctgtactgagaggaagataaagatggagtggagtctgacgcagagtaagctgctggcgtttcaccgtttgatgcgtacagataagcctattggcgcgttgctgctgctctggccgacgctttgggcgctatgggtggcgacgccgggtatgcctcagctgtggattttggcagtttttgtcgctggcgtgtggttaatgcgcgcggcgggctgcgtggtaaatgattatgccgatcgtaaatttgacggacatgtaaaacgtacggtcaaccggcctttacccagcggcgccgtgacagagaaagaagcgcgcaacctgtttgtggtgctggtgctgctggcgtttctgttggtgctgacgctgaacgccatgacgattctgctttccgtggcggcgctggcgttggcctgggtttatccctttatgaaacgctacacccacctgccgcaggtcgtgctgggggccgctttcggctggtcaatccccatggcgttcgccgcggtgagcgaatccctgccgttgagctgctggctgatgttcctcgccaatattctctgggcagtggcttacgatacgcaatatgcgatggtcgacagagatgatgatatcaagataggcattaaatcgacggcgatcttgtttggtcgttatgacacattgattatcgggattctgcagcttggcgtcatggcgttaatggcgctgatcggctggttgaatggtctgggatggggatattactgggctgtgctggtggcgggcgcgctgtttgtctaccagcaaaaactgattgcgaaccgtgagcgtgaagcctgctttaaagcctttatgaacaataactacgttggcctggtgctatttttagggctggcgatgagttactggcacttctgatgtcatgccgggcggacccggcctacaaagccaaaattttcaatacgtcatatcagttgcccgataagcttacgccatcgggcatttcaggcactggcttactcgccctgcgtcgcgctttcaatcgtcagacggacatcagaggtaatcagatcggcaagcatctgatatatcttcatcgtttctgccggttcggcatcgcccgtatcactgatataaccctcatcccgtagcgtcaacacgagtgaactgaacaccgctttgtcgaaaaactccggcgcgttaataccgtgcaggacagacagacgttgcgccacggtacggctttctttctccagcgtactgcggttgatggacggattggcgctcaacagccagaacgtaatggcataacgctgtagcgtttcgcgcgcgcctgccgccagcagttgcagcgtaccggaatgcgtcgggttgatatgcagttcatcatcctgcagggtaattagcccctgacgctgcatttcactggccagcgcgtcaatgaccgaggctaactcctcgcgctcccagcgcaggaacagctccgcttttaacatcggatagagcgcttcaacatgctgctgcaacgcatcacgcgaaatgcgacgatgctgggtgataatcgccgccatcagcgaaggcataatcaacatatgcgcgatattgttacgatagtaggtcatcaacaccgcctgctcgcgcggcagaatgatgatatcgccaatggtgtctttctcgacctcaaacttattcatctgcagcgcgtgagcgataagctcgccagcgctggcggcaggaacggttgagtctgtggaataagggacattgcgcatcagatcgagatagcaatcaagctgctcggtgagctgctcgcgggtgagcgagcgctgacgcgacgctaacagcgcggtacaacacaggttcatcgcgtttgccgcgccagcgttgttaatacgcaccatcagatcggcggcgatactatttaccgtcggcgtcagccaggctgggcgtatggcctctatagggtcgatagattcgcgccactccggcacatgctggttcaggtacgtcatgagcggcatcggttcgccaaagttaacgtagccctgacccagattgcgcagcttgctcaagcctttcagcatctgcggcaggctctctttctcttttgtcgcgccgcgcagttctttcgcataggtgcccacttccatgacgtgctcatagccgatgtaaataggcactaacgtaattggacgggtaccgccgcgcagcatcgcctggatagtcatcgacagggtgccggttttcgggtctaacaaacgtccggtacgcgaacgtcctccttcgacaaaatactcaaccgagtaaccgcggctgaacagttcgcccaggtattcgcgaaagacggtggaatagagtttattccccttaaaggtgcgacgaataaagaacgcgcccagacgacggaaaatcgggccagcgggccagaaattaaggttaataccggcggcaatgtgcggcggaaccagtccctggtgatacagcacataagaaaggagcaagtagtccatatggctgcggtgacagggtacatagacgatttcatgcccgtcgtgcgccagttggcgtacgcgctcggcgttatgcacgttaattccctggtaaagtcggttccaggtaaaccccaaaatcctgtcggtcaaacgaatcatctcgtaagagaagttcgccgcgatctcttccatcagcgcaatggcgttttgctgcgctttttcatgagagatttttttactgcgcgcttcgtcttctaccgcgcgggcgatcgctttcgaggccagcagtttgttaaacagatcctgacgggcaggcaggcgtgggccaaccgccgccaggcgctggcgagcaaagtgcatacgcgccacgcgagccagcttctgcgcgatgattttatcggtgccgtgttcatcagccatacgacgcaatgagacggacggcgagaatcggacaaagctatcgcgacccagccaggagatggcaaagaatttctgtacgccgttcagcatacgtaaaggcgggttatcttctcccttttcacgacccggcgcgcggccaaacatcacggaaacgggcaccatctgcacgtccaaagccggattactccgatgcagatcgagataatcgtgaaaaagtttcaccgactcttcttttggcgtgtaataggtaaagacacgcggtccgccgtgaataaatacatagcgtggcaacagcgcgccgtcgatctccagcggctccagcggatccgggagatcgtgcgccagacattgcgcccgcagcgtcagtaagtccgcttttgagttgtatggcaagacatacataatggggcgagaagtatcgagccccaattcctgggcgggttccgccggaatagacttgctttttaccagtatgcttaatggtaaattcagtaatttgtagtaaattcgtggccagccggacataaacgatgtaaagcctctggttaataatgcaaatgcggtgcaaggatatcagaaagtttagcgaatttctgttgtatcccgtcatacttcgcgctgcgttacggcagtccgaatcgtgcagggcaaccgtataatgtcattgacgttaataatgtaaaaaggttcttttgatggccaataataccactggattcaccagaattatcaaagcggcaggatattcctggaaaggatttcgcgccgcatggactcacgaagcggcgtttcgccaggaaagcctcgcggtattgctgggcgtcatcatcgcctgctggctggatgtggatgcgattacccgtgtgttattgataggttccgttttacttatcatgattgttgaaatcctcaacagcgctattgaagcggtcgtggaccgcatcggttctgaataccatgagctttccggccgtgcgaaagatatgggatcggctgcggtgctactgtctattttcgttgccctgatgacctggggcatcctgttatggtcacattttcgataaaggttccaaattttataaatctcttgttttttgcgccgtttgtggttccaaaatcacctttaactgtatatactcacagcatgattgtatatacacccagggggcggaatgaaagcgttaacggccaggcaacaagaggtgtttgatctcatccgggatcacatcagccagacaggtatgccaccgacgcgtgcggaaatcgcgcagcgtttggggttccgttccccaaacgcggcggaagaacaccttaaagcgctggcgcgcaaaggggtgcttgaaatcgtttccggcgcatcgcgaggtatccgtctgttacaggaagaagaggacggattaccgcttgtcgggcgtgtcgcggcgggtgaaccgcttctggcgcagcagcatattgaaggccattaccaggtcgatccttcgctgttcaaacccagcgccgatttcctgctgcgcgtgagcggtatgtcgatgaaagacatcggtattatggatggggatttgctggcggtacataaaacgcaggacgtccgtaatggccaggtggttgtcgctcgcattgatgatgaagtgacagtaaaacgcctgaaaaagcagggcaataaagtggagctgctgccggaaaacagcgagtttacaccgatagtggtggatctgcgcgaacaaagctttacgattgaagggctggcggtaggcgtcattcgcaacggggaatggttgtagtctctttttaatctccttgtaagccgccatccggcaatcgtgtagcctgatggcgctgcgcttatcaggcctacgggaatgcagttcctgagatgattaatttgtaggccggataaggcgttacgtcgccatccggcaatgcgctcgtttcgtttaactccttgtcaggcttttctccatgccgctttttacctcctctgataaagctctctggcgtcttgcgttgccgatgattttttctaacatcaccgtccccttactggggctggtcgatacggcggtgattggtcatctggacagccctgttttcctgggcggcgtggcggtgggcgcgactgccaccagctttcttttcatgctgctgctatttctacgtatgagcaccaccggcctaacggcgcaggcatttggcgccaaaaatccgcaggcgttagcccgggcgctcattcaaccgttattgctggcgctgggcgcaggcgtgatgattgtgctatttcgcacgccgcttatcgagctggctttacatattgtcggcgggaacgacgctgtcctggtgcaggcgagacgcttccttgaaattcgttggctaagcgctcccgcgtcactggcgaatctggtgctgctcggttggctgttaggcgttcagtatgcgcgggcgccggttatcttgttggtcgtgggcaatatcctcaatatcgcgctcgacctgtggctggtgatggggcttcatatgaacgtgcagggtgctgccctggcgacggtcatcgcagaatatgtcacgttactgatcggcctcatgatggtacgtaaagttctccatctccgcggtgtgtcgctggatatgctaaaacaggcctggcgcggcaacgtgcgccgccttttggcgctcaatcgcgatatcatgctgcgctcattgctccttcagctttgttttggcgcaatcacggtgtcaggcgcgcggctgggcagcgatattatcgcggtaaatgcagtcctgatgaccttactcacctttacggcctatgcgctggacggttttgcttatgcggtggaggcgcactccggtcaggcttacggcgcgcgtgacggtagcaagctactggacgtctggcgagcggcgtgtcgtcagtcaggaattgtggccttgttgttttccacagtctatgccctggcaggcgaacatattgtcgcgttactgacctcattgccgcaaatacagctactggcggatcggtatcttatctggcaggtggtattaccgctggtgggcgtatggtgctatctgctcgacggtatgtttattggcgcgacgcgcgctgccgaaatgcgcaatagcatggcagtcgccgcgggaggattcgcgctgacgctcttcgccctgccggtattaggaaatcatggtttatggctggcattaaccgtgttcctggcgcttcgcggtctgtcgttgagccttatctggcgtcgtcactggcgcgagggtacatggtttgccagatcgtgacggttaaaaattctgaatataaaaccgaaggccgaattcctgcctacaattattatcacgtccagcagaaattgcagagcatttgggcgaataacacctgctattcctaaccgaatgatgaggacaagatgatgaataaagacgaagccggcggtaactggaaacagtttaaaggtaaaatgaaagaacaatggggcaaactgaccgatgacgatatgaccgttatcgaaggtaaacgcgaccaactggtaggtaaaatccaggagcgttacggttaccagaaagatcaggcggaaaaagaggttgttgactgggaaacccgtaacaactatcgctggtaatatgttttcccctaccaggagtacatggatgtgcttccccctgtttgcttatgaatgcgggcgtgcccctctctactgccgcccgttttccgttcaggctaacgtggttttttcttcaccagcaccgagtgatcgtgaccacagtttcccggatggcgacacgcttctacttctacgcacgcagggcacagaccgtgcgcctcaataacgttatgtcgtagcgcaaagcccattttagccgccagcgtatgcatgatgtcttccacgccctcggcacactcttccttcaccacgccgcaacgatcgcagataaacatggccgagctgtgcgtcggctggtcgaacaggtggcaaaccacataactattggtggattccactttatggacaaaaccctgttcgagcaaaaaatccagcgcgcggtaaatggtgggcggtttggcctgtggttccgtttcgcgcagcaaatcgagcaaatcgtatgcgctgatggcaccctgttgcagactcatcaggcgcagcacttcgaggcgctgaggcgtcaggcgcacgttgcgctgcgcgcagagtttttcagcttgcgccagtaactcttgcgttgtggtcttttccatgtagcacctcgaatggcatgaaagtctaatccgttactttaccacgagctgcttaaaactctgaaattaccccgcgacaatatatcgcctgctaagcttttccgcgccagtattctcatctatacataatgagggtcgatattataacaacaggatttaacatcactatttcacagcaatagttcgcctctgtccggtaaagcgtggcggaggaattacttcacctgataataagatgggctaactgtgaacaaaaacgtcaaactttcactgattgctatcgcggtctcgctttttatggcaaagcaggcgagcgccgccaatacctggacggaagcgcgtaatgacgcaatgggcgggacgggcgttgcgtccgcgaattatggcagcggagtactattaaatccggcgttactggcaaaagccaaaccggaagacaatatcactgttgtccttcctgcggtcggcgtccagattacggataaagacaatctccaggatgaaattgacgatatcagcgataaagtggattactacgatgaggtcgtcgataaccttacgctggggcaaattctgctcaatccgcgaggcgtgctgaatcaatttcagggcgccgcgcgcgacctggccgatgagctggaatatctcaacggaaaaaccgcccgcgccaatgccggcgccgggttggcggtaagtattccagggcaaacgctttccgtggcgtttatcgccaaaggttatgcgcatgggcgcgtgagttcgtccattgatcagaacgatattcagtatctgcgcgatatccagcatgatgaacgtgtcgcgcttcgtgaagcaggacgcgctgctttgctggggtctgacgaaattacaaagcatttaaactctaccgcgtcggggcgggtagcgattgtatctgactacggtattgcgctggcgaagcagtttgtggtgggcgaggtgcctgtttccattggcgttacgccaaaactgcaaaaaacctggctctataactacaccacctcaatttataactacgacagtagcgactggaatagcagccgttatcgcaatgacgatacgggttttaacattgatgcggggcttgctgccgatatcggtgaaaactggacgctgggggtgagcggacaaaatctggtatctcgcgatatcgatacgaaagatatttacatcactaatggtatgacgggagaaaccaccaactacaaagatacataccaaatccgccccctggttaccgcgggcatcgcatggcataacgatttgctgaccgtaagcgccgatggcgatctgacggaaacgaaaggctttaagagcgaagacaattcacagtacgttggcgtcggcgctgaagttcgaccgttgtcatggctggcggtgcgcgcagggtatcgtgcggatgtgaaaaataacgatagcaatgtggttaccggcggtcttggctttgcgccctttaaccgtgtgcatctcgatttaatgggactgtacggcgaagatgaaacctggggggcaggcgcgcagcttacaatgacattctgaggtgctttcaccggaggcgctacgcctccggtttagcgttatgctatagtaacgccccttttttaaccggatgcttatttattcgccatgcagcctgaaacccagtcctccgctttacctgcttatcgcttctccatcgcgcctatgctcgactggacggacagacattgccgctatttcctgcgtttgctgtctcgccagacgcagctctacaccgaaatggtgaccacgggcgcgattattcacggtaagggtgactatctggcttatagcgaagaagagcatccggtcgctctacagcttggtggaagcgatccggctcagcttgcgcattgtgcaaagctggcggaagcgcgtggctacgatgaaattaacctcaacgtggggtgcccttccgatcgcgtgcaaaacggtatgtttggcgcctgtttgatgggcaatgcgcaactggtcgccgattgtgttaaagccatgcgtgatgtcgtctcgattccggtgacggtaaaaacccgcattggtattgacgatcaggacagctatgcgtttctgtgtgatttcatcgatacggtttccggtcagggcgaatgcgagatgtttattatccatgcgcgcaaagcctggctttctggcttaagcccgaaagaaaatcgtgagatcccgccgctggattacccgcgcgtctatcagctaaagcgggattttccgcacctgaccatgtccattaacggcggcatcaaatcgctggaagaggcgaaggagcacctgcgccatatggatggcgtcatggttggccgcgaagcttatcagaatccgggtatactggccgcggtggatcgggagatttttggcgccgataccaccgatgccgacccggttgcggtggttcgcgcgatgtatccctatattgagcgtgaattgagccagggagcgtatctggggcatatcactcgccatatgctggggttgttccagggcatccccggcgcgcggcagtggcgtcgctatctgagcgaaaacgcccataaagctggcgcggatgttgctgtactggagcaggcgctaaaactggtggcagacaagcgttaaaagttcgccaaaaattagtcaatctcaccacgccctgtgcagtcttgcagggcgtttttcttatatatcaataatataaatattggcatgatttttgtaagggcttacctgaccagacccggtaagcgccgtgccgccgggcaatgccatttttatggggagcgactatgctggaactactttttgtgcttggcttttttctgatgttaatggtgacgggcgtctccttgctgggcattctggccgctctggttgtagcgactgccgtcatgttcctgggcggaatgttcgccctgatgatcaagctgttaccgtggctactgctggcggtggctgtggtgtgggtgatcaaagcagtaaaaacgccaaaaatcccacagtatcagcgcaataaccgtcggttttactaaggtattgagcggttcgtcacaacctggaactttgccctcacaagcaaataggaatcgattattaaatctgtcatgattgcgcaggtaacgaattcatcgcgctgtaccctacatacagccgaacaaaaaaagaaagggcttcccgggtggaagcccaatttctttgcagagctattacggaatcagcaggcttgagccctgtgtggcccggctttccagcacttcatgcgcgcgacgggcatcttttaacgcatagcgttgattttcagccacatcgactttaatcacgccgctggcgatcaatgagaacaattcattgctggcttcggtcagttcttcacgtgtcgtaatatacccctgtagtgaaggtcgcgtggcatacagggaacctttctgattcagaatacctaaattcacgccggtgacggggccggacgcattgccgaaactgaccatcagtccccgacgttgcaggcagtccagtgaggcctcccaggtatctttccccacggagtcatagaccacgcggacttttttgccgccggtgatctcttttacccgttcgacaatgctctcctcacggtaattaattacctgccaggcaccggcgtccagcgcccgctgcgctttttgcgcgctaccgacggtaccgataagcttcgcgcccagcgcttttgcccattggcaggcgatcagaccgacgccgcccgcagcggcatgaaacaggaagggttcgtcgggtttcacttcataggttttgcgcaacaggtaaaaaacggtcaatcccttgagaaaagaggctgccgcctgttcgaaagaaatggcgtcaggcaaaatcgcggctttatctgcggtgacgttatggacggaactgtaagcgccgagcgttgactgcgcgtagacgacgcgatcgccgacgcgaatgtgctccacgccgttgccgactttactgaccacacccgcagcttcggttcccaggcccgcaggcaacgacgggggcggatagagtccgctacggatataggtgtcgatgaagttgataccaatggctttgttctcaacctggatttcgtgttccgccggttccgctggcgtaaactccacggtctgaagcacttccggaccaccatgcttgtgaaattcaatacgcgttgccatgcttcctccaaaagaaatgtggtaatctttcgacccaatcactatctcggtaactccattcactatggcaggaaataaacccttcaacaaaccacagactgatgcccgcgaccgcgatccgcaggttgccgggataaaagtgccgccgcactcgattgaagcggaacagtcggtgttgggcggtttaatgctggataacgagcgctgggacgatgtggccgagcgcgtggtggcggaagatttctatacccgcccgcatcgccatatctttacggagatggggcgcttgcaggaaagcggcagtcctatcgacctgattacgctcgcggaatcgctggagcggcagggccaactggacagcgtcggcggtttcgcctatctggcggagctgtctaaaaacacgccaagcgcggcgaatatcagtgcttatgcggacattgtgcgcgaacgcgccgtggtccgcgatatgatcgcggtggcgcatgaaattgcggacgccggttacgatccacaggggcgcaatagcgacgaactgctggatctggcggagtcgcgcgtcttccagatcgcggaaaaccgggccaacaaagacgaaggtccgaaaagcatcgaccagattctcgacgccaccgtggcgcgtattgagcagttgttccagcaaccgcacgatggcgttacaggcgtggataccggctatcaggatctcaataaaaagacggcagggttacagcgttcggatttgattatcgtcgcggcgcgtccctccatgggtaaaaccacttttgcgatgaacctctgcgaaaatgcggcgatgttgcaagataagccggtactgatctttagtctggagatgcccggcgaacagatcatgatgcgtatgctggcctcgctgtcccgcgtcgatcagacacgtattcgtaccggtcaacttgatgatgaagactgggcgcgaatctccggcacgatgggcattctgctggagaaacgcaatatgtatattgacgactcctcaggtcttacgccgacagaagtccgttcgcgcgcgcggcgtattttccgcgaacatggcgggttaagtctgattatgatcgactacctgcaattgatgcgtgtgccgtcgctttctgataaccgtactctggaaatcgccgaaatttctcgctcgttgaaagcgctggcgaaggaactccaggtgccggtcgtggcgctatcgcagcttaaccgctccctggaacaacgcgcggataaacgtccggtgaactccgacctgcgtgaatccggctctattgaacaggatgccgacttaattatgtttatctaccgtgatgaggtttatcacgagaacagcgacttaaaaggcattgctgaaattattattggtaagcaacgtaacggtcctatcggtacggttcgtctgacgttcaatggtcagtggtcgcgcttcgataactatgcgggaccgcaatacgatgatgagtaactctccgtcattcttttaacaaggaattcaaatgcaagcggcaacagtcgtcattaaccgccgcgctctgcgacacaacctgcaacgtctgcgtgaactggcgcctgccagtaagctggttgcggtggtgaaagcgaacgcttatggacacggtcttctggagaccgcgcgaacgctccctgatgctgacgcttttggcgtggcgcgtcttgaagaggctctacgtctgcgagcgggcgggatcacgcagccaatcctgctgctggagggttttttcgacgccgccgatttgccgaccatttccgcgcaatgtctgcataccgccgtacataatcaagagcagcttgccgccctggaggcggtggagctggcggagccggtaacggtctggatgaagctggataccggtatgcatcgtctcggcgtgcgtcccgaagaggcggaggcgttctaccagcgtctgacgcactgtaaaaatgtacgccagccggtgaatatcgtcagccattttgcccgtgcggatgagccggaatgcggcgctaccgaacatcagctcgacatttttaatgccttctgtcagggtaaacccggtcagcgctctattgccgcgtctggcggtatcctgctgtggccgcagtctcactttgactgggcgcgtccgggcatcattttgtatggcgtatcgccgctggagcacaaaccctgggggccggattttggttttcagccggtgatgtccttaacctccagtttgatcgcggtgcgtgaccacaaagcgggcgaaccggtgggctacggcgggacatgggtgagtgagcgcgacacgcgcctgggcgtggtggcgatgggttatggcgatggctacccacgagcggcgccttccggtacgccagtactggtcaatggtcgtgaagttccgattgtcgggcgggtggcgatggatatgatttgcgtagatttggggccaaacgcgcaggataacgcgggcgatccggtggtcttatggggtgaaggtctgccggttgaacgtatcgctgaaatgacaaaagtaagtgcttacgaacttatcacgcgcctgacctcaagggtggcgatgaagtatattgattaaatacgcggcgggccgggtggcgcttgcgcttatccggcttgtatcgcgcattggctgtaggccggataagacgttcacgccgtcatccggtaatatgcgcatccaccacaacatcctctcgatcttctcgtccttccggtttattgtgttatttcctgccctctgtaaacctggagaaccatcgcgtgtttcaaaaagttgacgcctatgccggcgatccgattctttcactgatggagcgttttaaagacgactcccgtcacgacaaagtgaatctgagcattggcctgtattacaacgaagacgggattatcccacagcttaaaacggtggccgaagccgaagcccggcttaacgcgcagccgcatggcgcttcgctgtacctgccgatggaaggactcaatacttatcgccatactatcgcgcctttgctctttggcgccgatcacccggttcttcagcaacagcgcgtggccactatccagacattaggcggctccggcgcgctgaaagtaggcgcggatttcctgaagcgttatttccccgacgcaggcgtatgggtgagcgaccccacctgggaaaaccatattgcgatatttgccggggcaggattcgaagtgagtacttacccctggtatgacgacgcgactaacggcatccgttttaacgatctgctggccacgctgaatacgttacctgcgcgcagtatcgtgttgctgcacccctgttgtcacaacccgaccggggcggatttaacgccttcgcaatgggatgcggtgattgaaatagtgaaagcgcgcgatctgattccgtttcttgatattgcctatcaggggtttggcgcaggcatggacgatgatgcgtacgttattcgcgccattgccagcgctgggttacctgcgttagtcagtaattctttttcgaagattttctcgctgtacggcgagcgcgtcggcggcctgtccgtggtgtgtgaagatgctgaaatcgccgcgcgggttctgggacagctaaaagcgacggtgcgccgaatttactccagtccgccgtgtttcggcgctcaggtggtcgctacggtcctgggcgatgaggcgttaaaagcgggctggctggcggaagtcgacgcgatgcgtaaccgcattatatcgatgcgccagacgctggtgaaggagctgaaggcggagatgcctgaccgcaactttgattacttgttacagcagcgcggtatgttcagctataccgggttaagcgaggagcaggtcgatcggttgcgcgatgagtttggcgtttacctgattgccagtggccgcatgtgtgtcgccgggcttaatgcttcaaatgtacaccgcgtggcgaaggcatttgccgctgtcatgtaatattcaggccggacggcgataacagtgccctccggcctgacaatagctgttgtgatcatcctcttttttcgtaacaaaaccgcagataatccttccttttgaccgttactggcgttatggtcagatagttttttgagcaaagactcatcttaataattataatattttgaattttaagggaaaaccatgaaaaaaataaccctggcgctgagtgccgtctgtttgttgtttacgctaaaccattccgcgaatgcgttagtatcttccccttcgacgctcaatccgggcactaatgttgcaaaactcgcggaacaagcgcctgtccattgggtctctgtcgcccagattgaaaacagcctcaccggacgcccgccgatggcggtcggctttgatattgacgacaccgtgttattttccagccccggattctggcgcggaaagaaaacctactccccggacagcgacgattatctgaaaaatccggccttttgggaaaaaatgaacaacggctgggatgagttcagtattccaaaagaagtggcccgacagctcattgatatgcatgttcgccgtggcgacagtatttactttgtcactggtcgtagtcagacgaaaacggaaaccgtgtcgaaaacgctggcggataacttccatattccggcggcgaatatgaatccggtgattttcgccggcgataaaccggaacaaaatacgaaagtacagtggctgcaggagaagaacatgcgtatcttctacggcgattcggataacgatattaccgcggcccgtgattgtggtatccgcggtattcgcatcctgcgcgcggctaactccacctacaaaccgctgccgcaggcaggagcgtttggcgaggaagtcattgtcaactcggagtactaaaaatcaggagagcgacaggctctccttttttgcatgatttttgcacaaacttgccccgctggcttttaccttttccagacttgctgcacactattcaggagacgtttgtttttaggaaggagcagcctatgtggtatcagcgcaccattacactgagcgagaagccgcgcgggtttcatctgataacagatgaaattaccgataaattgtctggcttaccgcctgtcgaaacgggtttgctgcatctgttgttgctacatacctcggcctcgctgacgttaaacgaaaactgcgatcccaccgtgcgcgctgatatggagcgccatttcctgaaaaccgttcccgataatgcggcgtatgaacatgattacgaaggcgcggatgacatgccttcgcatattaagtcgtcagtattgggcgtctcgttgctgctgcctgtacgccaggggcgtttacagttaggaacatggcaaggtatctggttgggagagcaccgtattcacggcggtccacgtaaaatcatcgcgacactacaaggggaatgataatgaccatttcggaattactgcaatactgcatggcaaaacctggcgcagagcagagcgtccacagcgactggaaagcgacgcaaattaaagtggaagatgtacttttcgcgatggtaaaagaagttgaaggacgcccggcagcctctctcaaaaccagcccggaactggcagagttgttacgtcagcagcacagcgatgtacgaccgagtcggcaccttaataaagcgcactggagcacggtctatctggacggctcgctgccggattcacaactctattatctggtcgatgcctcttatcaacaggcggtaaatgcgctgtcggaagataaacgcaagcagttgccgcagtcctgattatagcgcgccgaccaacaacgccagggcgatatcaatgaggcggatgaccgtagaccggatacggctgccgagggcgatttgcgcattattggcgcgtagcctggcgaggtcccgctgtccttccagcagaataatcatatcgtcgtcgtccagccagccgcgagcatgttcctgaagcgcgcgggcgataaacgcggcggactcgcggatagcgtcgtcgctgtcttctcttgcctgcttatacgtctggataaactcggcaatcgccgaggacgctacagggtgttcggcctgggcggtggttatcaggtaatgtatttcgttaatagacgccattttcatctccctgagtgcagcgggcgccccaatgcagacactcgccctgtatggctaatttccagacctgattattttgctgttggtatctctcagcctggatgtaagtaagtggttgcttacgtcgcataacccgcgcataaagacgcaaatagtgatttttcagcagcgccagattatcgagacggtgtttatccccaccttgacgggcgacccgctcagcctgaaaaaatatctggcggatatcgcggtcatccttgagcagtgtctctttttgccacggtattcgcgccgcgtcctgcaggaagcgggttgagcgcgcttgtaatagcgttagttgttgaaaagccacggcgctaaagcggtcaggcagcgtacaggcggataaaaacaggcacagcagtagtgtgattgcgtagggcaacttcatggtgttttccataacagaccgtttgcgctatcacatgtcagagcgaggcggcacgcaaatcacaaatgctcaacacggatacaatgaggtgggatgaggaaaaatgatgccgcttcccggcgaatcggaaagcggcgtgaaggttatttgagcataggtttaaggaagcgggcggtatgcgacgcctcgcactccgccacggtttccggcgtaccggcgacgagaatttcgccgccgccgctgccgccttccgggccgaggtcgacaatccagtccgccgttttaatgacgtccaggttgtgttcgatcaccacgatggtgttgccctgatcgcgcaactgatgcagaacgtcaagcaactgctgaatatcggcaaagtgcaggccggtggttggctcgtcgagaatatacagcgtctgcccggtgccgcgcttcgacagttcgcgcgccagcttcacgcgctgggcctcgccgccggaaagcgttgtcgccgactgaccaagacggatataggtcagccctacgtccatcagcgtctgcagcttacgcgccagcgccggaaccgcatcaaagaactcacgcgcttcttcaatggtcatatccagcacttcgtggatggtcttgcctttgtacttaatctccagcgtttcccggttatagcgcttgcctttgcactggtcgcacggcacgtaaatatccggcagaaagtgcatttcgactttaatgacgccatcgccctggcacgcttcgcagcgaccgccgcgcacgttgaagctgaatcgccctggcgtgtagccgcgcgagcgagactccggcacgccagcaaaaagctcgcgaaccggggtaaagacgcccgtataggtcgccgggttggaacgcggggtgcgcccgattgggctctggtcgatatcgatcactttatcgaaatgttccagcccctgaatatcccgatacggcgccggttcggcgatagtcgccccgtttaactgacgctgggcgatggggaacagcgtgtcgttaatcagcgtcgatttaccggaacccgagacgccggtgatacaggtaaacagccctaccggtagcgtaagggtcacatctttcaggttgttgccgcgcgcgccggtgagtttgagcactttttctggatttgccggcacgcgttgtttcggcacttcaattttgcgtttaccgctcatgtactggccggtcagcgattccggtaccgccataatggcttccagcgggccttccgccaccacctcgccgccgtgaacgcccgcgccggggccaatatcaatcacatggtcggcggcgcgaatggcgtcttcatcgtgttccaccacaatcacggtattgccaagattgcgcagatgaatcagcgtacccagcagccgttcgttatcgcgctggtgcagaccgatggacggctcatccagcacatacatcacgccgactaacccggcgcctatctggctcgccagacgaatacgctgggcttcgccgccggaaagcgtctctgccgagcgggagagcgtgagatagttcaggccgacgttcaccagaaacttgaggcgatcgccgatctcttttagcactttttcggcgattttcgctcgttgcccggaaagcttgagattagtgaaaaaatccatcgcatggccaatgctcatatcagaaatagcaggcagcggcgtattttccacaaatacatggcgcgcttcgcgattcagtcgcgtgccttcacagctggcgcaggggcgattactgatgaacttcgccagctcttcgcgcaccgcgctggattccgtctctttataacggcgctccatattatgcagcacgccttcgaacggatggcggcgcacggaggtatcgccgcgatcgttcatatatttaaattcaatgttctctttgccggaaccgtacagcacgactttatgtacgttggcgctgaggcttgcccacggcgcatctacgtcgaacttatagtgttccgccagcgacttgagcatttgaaagtagtaaaaattgcgacgatcccaaccacgaatcgcgccgcctgccagcgacaggtcgggattctggatcacgcggtccggatcgaaatattgctgaacgccgaggccgtcacaggtcgggcaggcgcctgccgggttgttgaacgagaacagacgcggttccagctcgcgcatactgtagccgcaaatcggacaggcaaaattggcggagaacagaagctcctccgctttctcatcgtccatatcggcaacaaccgccgtgccgccggataattccagcgccgtttcgaacgactccgccaggcgttgggaaagatcgttgcgaactttgaagcgatcgatcaccacctcaatggtatgtttcttttgtagctccagcttcggcggatcggagagatcgcagacttcgccgtcaatacgggcgcgaatgtaaccctggcttgccagattttccagcgttttggtgtgttcgcctttacgctctttaataatcggcgcgagcagcatcagacgtttgccttccggctgtgacagcacgttatcgaccatctggctaacggtttgcgccgccagcggcacgtcatgatccggacaacgcggctcgcccacgcgggcaaacagcaggcgcaggtagtcgtggatctcggtaatagtacccaccgtagagcgcgggttgtgcgatgtcgatttctgttcaattgagatcgcgggcgatagcccctcaatatggtcgacatccggtttttccatgagcgacaaaaactgccgcgcgtaagcggagagcgattcaacgtaacgacgctgcccttcggcatacagagtgtcgaaagccagtgaggatttgcctgaacccgaaagcccggtcacgacaatcagtttgtcgcgggggatgacgaggttaatatttttgagattatgggtgcgggcgccccgaacttcgatcttatccattcacctttcccggtagagactcggatgcctggtttgtttgaaggacaaacggcagaaacggctaattatgacacaatttaacctgtttgaatatacagtattggaatgcatcttcagctaaagtatgcaacaatatgaggttcgcgcgagtgacctggaacctgcatcgcagctattaaaatgctacgtggaaatggtacactcacgcgtttacactatttatgaaacgtattcaggagactcaattatggccagcagaggcgtaaacaaggtgattctcgttggtaatctgggccaggacccggaagtacgctatatgccgagtggcggcgctgtcgccaacttaacgctggctacttctgaatcctggcgcgataagcagaccggcgaaatgaaagagcagactgaatggcaccgggtggtgatgttcggcaaactggcggaagtggccggcgaatatctgcgtaaaggttctcaggtgtatatcgaaggtcaattgcgtacccgcaagtggaccgatcagagtggccaggaacgctatacgactgaaattaacgttccgcagatcggcggcgtgatgcagatgctgggtggtcgccagggcggcggcgcaccggcaggcggtcagcagcaggggggttggggtcagccgcaacaacctcagcagccgcagggcggcaaccagttcagcggcggcgcgcagtcgcgtccacagcaatccgcgccagcgccgtctaacgaaccgccaatggattttgacgacgacattccgttctgatttttggtaaaaaactcaaagcgttatttgcattttcgctatagttctcgtctgctgaaatgcctggtgtaaaccaggcattttcttacctggtattattgtctttgtatccctttcaaaaaagagaagcgcatatcttacggaaaaatgtcgcttatcgcctctggccgactcgcctcggcacatcattatccagccgaagttcataaatgtactgcaataacccggattgtcttaaatatgaaagagaaatctcatctgcaaaatatataatttatagccattttttgacaacaaaaagatattataaaataacggtagagaatggtcggtattatcaatggttaattaaatgtttgctttagcttgtgatgagctcaaatatgatatgtgtatcttgctttatttttaattgctgaagataaaattgttacttatagctggctttatataaaaaatggttttatttgtgtatttttttacacaattctgattttttactccccacttattatattttcaatgatttaagttatattgaagtccatatgaccctatgttttaattgtgaaaattaattttatcctctggaggcaaatttattaaatacgtatggttataacgcgtattaaaaagaaatatgtccttaaaatgatttagagtttcaatgattagctaacaaatctatttatcggcgggtggttttaatttgctgatgactattttttatttatgagttgagagcttatgcgatacctattattggggaggatatagttagtgcaataattgatgtctacctaattaaaaaaatgaagagtgtttttaattaaagcactcatctttgttgtgggcgcataaaaatggcgtcgttgtttttatttttctgattacgagatgtaagaaaactgaaatctataaagcgtattggtagcaggaagccaagggcggtagcgttcactttctgaataagttgagcatcctttatcctttctaatccacaaaaacattttattcacaatgtaatatcaggagacaacatggaagacgaaagtaatccgtggcctagttttgttgatacattctctacggtattgtgcatttttatatttcttatgttggtgtttgcacttaataatatgattattatgtatgacaactcaattaaagtttataaagcaaatatagagaataagactaaatctactgctcaaaatagcggagccaatgacgattcaaatcctaatgaaatagttaataaggaagtgaatactcaagatgtgtcggacggaatgactacaatgtcaggtaaggaggttggagtatacgatatcgccgatggtcagaaaactgatataacgtctacaaaaaatgagcttgttattacgtatcatggcaggctgagaagcttttcagaagaggacacttataaaataaaggcttggttagaagacaaaatcaatagtaatttattgatagaaatggttattcctcaggcagacatctctttctctgactctctacgactgggatatgaacggggaattattttgatgaaagagattaagaaaatatatcctgatgtagttattgacatgagtgttaactccgcagcatcaagtacaacgagtaaagctattatcacgactattaataaaaaggtgtcagagtgaaatatataaatcattaccgctatttgtttgtctgttttttccttgccatactccctttttttgctttatcttttcccggtataagagagtatgtttttgataacttcatggtttctgcaatttacaatggagtcattattgccatttatattacaggttctttgtgtgcattattcactattcttaaaaatatttcagcaaaagacatattaatagctcaggacgccagtagaaaaaatagcattctttctaacctcaatcaggttttgtttgccggggagtccaaacagtgtgatttcaatttactgatggaattagatgacaatgtgtctaccgcccgtaatcaacgattgtcatttattatgagctgtagcaatgtgtcgacgcttgttggcctgttggggacgtttgcgggtctgtctattacgattggttcaatcgggaacttattgagctcgccatcagatgttggcggtgataatgcaagtaatacactcaatatgatcgtgacaatggtagcgtcgctttctgaaccattgaaagggatgaataccgcatttgtatcttctatctatggtgttgtttgcgccatactcctgacctcacaaagtgtttttgttcgcagctcctattcccttgtttctacggaaatcaaaaaattaaaaatcataagcaacagagccaataataaacagcgaagcctgcgggttgaatcagagacgcttgtagaatttaaagagttgtttaaagcgttttttgataactacctgacagttgaaaacttacggacgcaggatgaagaaaagaaacgagagatgctatcagatagctttgtcactttgcaaaaccgactattggataactcagcaaaactggaacaaatttctacgctgattgatggttatctggtaagcagtaacgaaaatctcaaaaaattatctgacggtgtaataacaattacctctcgtttatctgaaggtaatatcctgcttgctgataataatgcacgactggaggcaatgagtacaatacaaaatattatagataaaaagaatgattcaataatgacatcagttgataaatgttatcaggaatctctttcacatggtaagaccataaacgatattgccgctggcagtgccgatatttctcatactctcgatgggctgagaaaagaaatggatgaggatatgaataatgttcatttagcgctatccgatctatcggctactgataaaaagattattgccaatactaaagagattagtgctgaaatggttagctaccgtgatacctatatgccattaatggaaaaaataacatctatgcatcaggaaatagtaaagcaacgtttgttaaacaaggaggaaaaaaatgaagattaagatgttttttctgacgactgcttttattacacaaagcacatacgccagcgagcttccggtcattcctctaagagatttagttaatgccgcattaacgcatcagccctctgttgctgtttcatattatgagactgaaaagaaaaacagtgacttagatctttcacgggcagcactttatcctaccctggatctaacatctggccttaataataacaggaaagagtcatcaggtaccgagaggaacgttgaaaataaggtgtctttatcataccgaataacggattttggagtgaggggggctaatatcaggaaatctgaatatgaaagagataatagtaaaactgactatgaaaaaacaaagaatatagtgtctcaggaggttgtgacaacctattacaacatcagtaaatatcgtgaaatgattgatggcgtaaatctggagaaagagttttataaaaagatgctggaaactttttcgttgctggtatcttccggtgtagctatgcaatctgatatgcgtaaagtacaagtatctatcgatgcattaaataccagaagcattatgtatcagtcgatgttggatgatgaaatgtataaaatgcagaatatgactggtctgaatttatcgccagttcagattcaaagcgatgaaaaattcaacctcttcaaaaaatatatctttgtcgaaagccctgaaaaacttatggacatggtgatgaaatacaacgatgactataagatgcttgtcaatacccgaaaagccgcgaccgaagatattaatgccgcaaaatcatcctattttccgactgtagatcttgtttccagctatgtacagaataacccgagcggtagtgccaaaaaaagtgattatgaagatgaatttaaaacgggtatcaatgtcagtttcaacatttttaatgggttcagaaattcagcccaggaaagaaaaatggtggcaagttactcgcaggctaagctgcaaattgacgattttttgattaaaacgcgttataacattgattcacaactttcaagatacgccgctgcaaaagagacttactcagtggcggaacgttcacatacaaacgcgttacagcttactgaattatatgagcaggagtttcagttagggcaaaaaagtttgcttgatttaatttcaagccgtaatgaagcatttcaggcatatgtaagcatgatcgacagcaaatatagcctgtatattttaaagctacagcaactctcattgatttttcatttaatggattatttaaaaggaaatactgaaagtgagttaaatgtaatgaaatgaatagaagacaaagcgatcatctcatgatgataattatttctttgacgatcttaattattatccttacctactttatagaaattaattcagtggttcatggtcagggcgttatcactactaaagataatgctcagttaatatctctttctaaaggagggacgatacaagatatttatgtagccgagggtgatactgtaaaaaaaggagaactccttgcaaaggtcgttaaccttgatctgcaaaaagaatatcaaaggtatagaactcaaaaagggtatctggataaagatgttaacgaaatatctttcattcttgataaagaaaatgagagtgggttgattaccctggatggcacccgttctttaagcaataaagaggtaaaagcgaatattgaattagtgcatagtcagataagagctaaagagttaaaaaaaacctctcttgattctgagattagcggattacaagagaagctgagttcgaaagaaaaagaactcgcattgcttgccgaagaaataaatattctttccccactggtaaaaaaaggaattagcccatataccaattttcttaacaagaaacaggcgtatataaaagttaagtctgaaattaatgatattgaaagtagcatcactttaaaaaaagatgatattgagttggttgttaatgatattgaggcgcttaataatgaattgcgactatctttatctaaaataatatctaaaaatcttcaggaacttgaggttgttaactctacattaaaagtaatagagaagcagataaatgaggaggatatctattcaccggttgacggtgtaatttataaaatcaataaaagtgccactactcatggtggtgtgattcaggcggcggacttactttttgaaataaaaccaaaagtaaggactatgctggccgatgtgaaaatattacccaaataccgtgaccaaatatatgtagatgaagccgttaaactggatgtgcagtcaattatccaaccaaagataaaatcgtataatgcgactatcgataatattagccctgattcctatgaggaaaataccggaggaacaattcagcgttattataaagtaattattgcattcgatgttaatgaagatgatttacggtggttaaaaccaggtatgactgttgacgccagtgtaattaccggaaaacacagcattatggaatacctgttatctcccttgatgaaaggcgtggacaaagccttttcagaaccagttaatactaaacgattagatacaccttgagagtgaatataatattatgggaaataaaagcatacaaaagttttttgccgatcaaaattctgtaattgatttatcttctttgggtaatgccaaaggcgcaaaagtttctctttccgggccagacatgaacattaccacgccgcgtggttcagtgatcattgtcaatggcgctctttattcaagtatcaaaggcaataacctcgctgttaaatttaaagataagactattaccggcgctaaaattctgggcagcgtagatttaaaagatattcaactggagagaattgacagctcattggttgattctgctcaggtagaaaagaaaggtaatggcaaacgacgaaataagaaggaagaagaggaattaaaaaagcagcttgacgatgctgaaaacgcaaagaaagaagctgataaggcgaaggaagaagcagagaaagctaaggaggctgcagaaaaagcgctcaatgaagcgtttgaagtacagaactcgtcaaagcaaattgaagaaatgctgcagaactttttggctgacaatgtagcaaaagacaatctggctcagcaaagcgatgcttcccagcaaaatacacaggctaaagcaacgcaggcttctaaacagaacgatgctgaaaaagttcttcctcaacctattaataaaaataccagtactggcaaaagtaatagcagtaaaaatgaggaaaataagctcgatgccgagtctgttaaagagccgcttaaagtcacattagcgcttgcggccgagagtaacagcggtagcaaagatgatagtataactaattttaccaaacctcagtttgtaggtagcactgctcccaatgccacggttattattaaaattaatggtattgctgtcggtcaggctgtagcggatagtttgggtaacttcacctttacagcgcctgaaacattgactgatggaacatataatctggaggcagaggccaagactgctgatgggagcggtagcgccaaacttgtcattactatcgattccgttaccgataaaccaacatttgaactttcgcctgaaagtagtgtgtccggtcataagggcttaacgccgaccttgacgccttcaattgttggtacggcggaagagaatgctaaggttgacatttatgtagataataaactggttgccagcgttgatgtcgataaagatggaaactggagttatgaatttaaggataatgaattatctgagggcgaaaatagtataaaagtcgttgctgtagataaagcaggtaataaaaacgaaacgacggatagtatcataaccgacaccattgctccagaaaagccgacgattgagctggatgatagtagtgattccggcattaaaaatgacaacattacaaatagcaccctgccaacatttattggtgtggcggaacccggttctacagtctctatttatcttggacttaaacatcttggtgaggtcattgttgctaaagatgggacatggagctatacgcttactacgccgctcaaggatggcgaatacaatataacagcaacagctactgatattgccgggcatacctcagcgacggcaaatctgccttttactattgatacacgtatcagctatttcagcgctgagattgaaacgacgaatgatagcggtattgtcggagataacgttactaacaatactcgcccaacctttacaggtaaaactgagccaaatgctattatcagtgtcataaatagtgagactggcgaagaggttatttttaaagcgaatgacaagggcgaatggacgttcaatttcacttccgactcagtggaagggattaacaatcttacgttcactgttgaagatgtcgctggcaacaaaaaggatttttcctttagttacgttattgatactattgcccctgtacctccgacggtttctttggaggattatgttgttttgccgaatggtataattttatcagggaatgatttaccggctttagtcggtacggcagagccaaagtctaccatcttattgatgcgagatggtaaattatatgacagcattgaggttgactcaaacgggacctggaattatcagtttagtaataaatttcttcagggcgcctatgatattgaaatcatttctcaggatgccgccggcaataaatcctctactgttaaatattcttttactattcaaactgaagttgtacctccaaaagcggaactcgatgccagtgatgattccggtgcaaaaggcgactggattaccaataaacataatgctctgacattactgggaacagcggataggtttgctaccgtaaatatccttattgacggtaaaacgataggcgtgacgactgcggatgcagacggtaactggaattttgatatttccagaaatctgtctgacaatgtttataagattacggttgaatccatcgatcctttaggaagaacgtcatctgtagattatcagcttaccattgatagctttacgccgatccctactgttatgttgcatgatagcgctgactctggcgttaaaggcgatatgattactaaaattaatacaccgttgtttaccgggatggctgaagctaatgctaaggtttccatctatgttgacggtgtgttaagtggtgaggctattgctggcgatgatggtgtatggaattttcaatttaccacagcgttatccgatggctcgcatgacgtaacggtaaaggtagaagatattgccggtaatactgcctcctcatcagcgtataatttccaaatcgtaacgcaaacgcaaaaaccaacaatagagttggtcaacgatacgggggttgataatacagaccatattattaatgaaaagaatcctgcactgacaggaaccgctgcaccctattcaacggttaaactctatattgatggtgcactgatcgctgaggtcagaacaaataaagatggcagatgggagtataccctgaaagccgatcaaggtttggttgatggcgatcatagaataaccgcttcagttgaagatatcgctggcaacattgctcattcggatcctttcttaattagcgtcgatactgctatttcaataccgatagtttcattgagcccggattcagattcgggaatttcagatgataatttaacgaatatcgttaaacctaccttgcacctaaaagatattgatccggacattatcagtgttcaggtatgggatgccatgtctgatacgcagatcggtgttgccacgcaacaacctgatggttcatgggcctatacctttacttcagatttaacggaaggcttgcatcaggtttatgtcaaggttgaggacattgcgggtaataaagcgaacagcgcgatattcgattttactatcgataccacagtatcaacgccggtgatttccctgctttctaaggatgatacgggggttacaggcgataacctgaccaatatcaataagccaggttttgctatttccggtgttgatgccgatgcgcatcgggtcgtcgtacaggtgatgcacaatggcgtgagcgaagagatcgaactttcccacctcaatggtagttggttatttataccagggaatacgtgggcggatggcagctacacgttaacggtgaaagtagaagataaggcaggaaataccaactactcagcgccgctgacggtcgttatcgatacccaaatcgccattgatggggtggaactggtcaacgatagcggcgtgaaaggcgataatatgaccaacgacgaccgtccccactttcgtgtgacggtacctacggatgtcaatgaagtccgtctgagcattgacggtggtaattcgtgggttcaggcaactccgggcgtggcaggaagctgggagtatatctggccgacagacctggcagatggtcaatacacgctaacggtggaagcgactgataaagcaggcaatacagtgacgaagaccatcgatttcgcggtggataccacgctgtcagtgccggtcatcgtactggatagcgcggacgacaccggcatccagggcgataacatgacgaatagcacccagccgacatttgccctgcagcatattgatgatgatgccgttcgcgttacggtcagcgtggagcatggcggcgtcaccaccacatttgacgccacgaaaggcacaggcggatggacctttacgccgccgacatcatgggcggatggtgattataccctgagtgtgtcagtcgaagataaagcggggaacaccagccattctgcatcgctgacggtgacggtggacacgcaaatcgccattaataacattgaactggtcaatgacagcggtattcccgacgataatctgactaataatgtgcgtccgcacttccaggtgacggtaccgacggatgtcaacgtggtgcgcctgagcattgacggcggcaagacgtggttcaacgctacccagagcgcgacgccaggcgtctgggattatatctggccggatgatgtggccgacggaggctataccctgacggtagaagcgaccgatgaggcgggaaataaggcaacacagacgctcgatttcaccatcgataccactctgtctgtgccgaccctctcgctggacagcgcagatgacagcggcatcgcgggcgataatatcaccaatgttaaaacgccgggctttaccctcaacaatattgataccgatgtcagccgggtgatagtggaggtaatgcacaatggcattaaacaggaggtgccactggttcagaccggcggacagtggcgctttgcgccgaccagcgactgggcggacggcgactatatcctgacggtgaaggtagaagatagggccggaaatgtgaagcagtccgcgccgttgacggtgacagtagacacgcatatcgccattgaccgtattgaactggttaacgacagcggtatccccggcgataatctgaccaatgaagcgcgcccgcactttcaggtgacagtaccggcggatgttaacggtgtaagactgagtattgatggcggcaaaacgtggtttgacgccacgcagagcgcgacgtcgggcgtctgggattacacctggctgacgaatgtggctaacggccctcacaccctgatggtggaagcgtccgacaaggcgggaaacaaaacgacgcagaaactggacttcaccatcgataccattctgtcagaaccgacgattaccctggacagcgcggatgatagcgccgctggcgataacatcaccaacgttaagatgccaggctttaccctcggtaatatcgacgccgacgtgaccaaagtggtggtgacggtggcgcatgatggtaagaaccaacagatagagttgattaagaacggcggtgtgtggcgctttacgccgggcgcagcctggaccgatggcgactatacgttgacggtaaaggtagaagataaggcgggtaatacaaattattctgcgccgctgacggtgactatcgatacgcaaacgtctattgatcgcattgagcttcttaatgacacgggtattgtcggggataacctgaccaatgaagcacgtccacagtttcatattacggtaccgacggacgtgaactctgtgcaactgagtcttgatggcggcatcaactgggttaacgcaacgctgacgtctgacggcgtttgggagtatatatggccgacagatctggtcgaaaatacgtataccctgacagtgaaagcaaccgatgttgcaggcaacacggcgacggaaacgctcaattttatcattgataccacattgtcgacaccgaccatcacgctggatagcgcagatgatagcggcaccgccaacgataataagactaacgttaaaacgccgggttttattatcggcggtattgattctgacgtgactcaggtcgtcgtgcaggtgatgcgcgatggtcacagcgaggaggtggagctgacgcagactaacgggcagtggcgttttgtacccggcagcgcgtggactgatggcgactatacgctgacggtaacggtgaaagatgaggcgggtaatattcgccactcagcgccgttgacggtcaccatcgatacgcaaatcaccattgaccatattgaactggtcaatgacagcggtattcccgacgataatctaactaataatgtgcgtccgcacttccaggtgacggtaccgacggatgtcaacgtggtgcgcctgagcattgacggcggtaagacgtggttcaacgctacccagagcgcgacgccgggcgtctgggattatacctggctggctgatgtgggagagggtaagcataccctgacagtggaggcgaccgacaaggcgggaaacaaaacgacgcagcaactggacttcatcatcgataccctactgtcagaaccgactatcgtgctggacagcacggacgacagcggaacaaaaggcgatcacctgaccaacgtaaataagccgacgtttttactgggcaatattgacgcagacgcgcggtatgtcacggttgaggtacagcatggcggcacgaaagaggtgctgacggccaccaaagacgcgaccggcaactggagcgtgacaccgaccggcacatgggcagatggcgactatacgctgacagtgagggtggaagatgaggcggggaacgaaaaacactcagcgtcgctgacggtcactgttgatacccaaatcaccattgatgttattgaactggttaatgataacggtattcccggcgacaatatgactaacgacgcccatccgcagttccgcgtgacggtaccgggggacgttaacgaagtcagtctgagcattgacggtggcgtgacctgggttaaggcgacacagagcgcgacgccgggcgtctggaattatacctggccgggcaccgtgccggatggcgactatacgctgaatgtgaaagcgactgacaatgcgggtaatacggtgacggagacactccacttcactattgatactacgttgtcgacgccggtgatcgtactggatagcgcggacgacagtggtgtccatggcgataacatgaccaatcacacccagccgacatttgccctgcagcatattgatgatgatgccgttcgcgttacggtcagcgtagagcatggcggcgtcaccaccacatttgacgccacgaaagacgcaggcggatggacctttacgccgacaggggcgtgggcggatggtgattataccctgagtgtgtcagtcgaagataaagcggggaacaccagccattctgcatcgctgacggtgacggtggacacgcaaatcgccattaataacattgaactggtcaatgacagcggtattcccgacgataatctgactaataacgtgcgtccgcacttccaggtgacggtaccgactgatgtcaacgtggtgcgcctgagcattgacggcggcaagacgtggttcaacgcgacccagagcgcgacgccgggtgtctgggattatacctggctggctgatgtgggagaggggaagcataccctgacagtggaggcgaccgacaaggcgggaaacaaaacgacgcagcaactggacttcatcatcgataccctactgtcagaaccgactatcgtgctggacaacacggacgacagcggaacaaaaggcgataacctgaccaacgtaaataagccgacgtttttactgggcaatattgacgcagacgcgcggtatgtcacggttgaggtgcaacatggcggcacgaaagaagtgctgacggccaccaaaggcgcgaccggcatctggagcgtgacaccgaccggcacatgggcagatggcgactatacgctgacggtgagggtggaggatgatgcggggaacgtaaaatactcagcgccgctgacggtcacggttgacacccaaatcaccatcgatgttattgaactggttaatgataacggtattcccggcgacaacctgaccaatgacgttcgtccacacttccgcgtcacggtgccaggggatgtcaacgaggtacgtctgagtatcgacggcggtaatacgtgggttcgtgcaacacagggcacggcagggatctgggattacacctggccgaaagatgtgaccgacgggctacataccctgacggtagaagcgaccgataaggcgggaaataagacgacgcagacgctcgattttaccattgatacccggctgtcaacgcctaccatcgctatggatagcagggacgatacaggtgccattggcgatcatattacgagcgtcaaaagaccgggctttactattggcaatattgacgccgatgcgcactcggtcattttgcggatcacacagggcggcaatagccaggaagtgacactaacccaggttggaggacagtggcgctttacgccagatgctgactgggcggacggtagctatacgctgacggtagaggtaacggataacgcaggaaacgttcgtcagtccacgccgctggtggtgacggtggacacgcaaaccagcattactgatattacattggtcaatgatcatggcgtgcctgatgacaatctaactaatagcacccgtccgcagtttgagatcacggtgccggcggatgtgaattctgtgcaactgagcattgatgggggcgcaaactgggtgagcgcgacgcagggtatcgaaggcgtctggggctatacctggccaacggatatgggcgatggaaaacacaccctaaccgtcatggtcaccgacagagcgggcaatacggcgacgcaaacgcttgaatttttcatcgacacccggttgtcgacgccgaccattgcgctggatagcacggatgataccggtacgcctggcgatgatatgaccaatcgcacccgaccgacctttattctgcagaatatcgattcggatgttatcaacgttacagtcagcgtcacgcataatggaacgacaacctcgtttactgcgacacagggggctggaggatggagctttacaccgccagcgccgtggggcgacggtgattatacgctgacggtgacagtggaggatcgggcgggaaatacgcgtccgtctacgccgctgacggtgacagtggatacgcaaatagccattgatcgtattgaattagtcaacgatagcggcgtccctggcgataatgtgacaaaacatgtgcgtccgcagttccagatctcggtaccggatgatgtggaaaaggttcttctgagtattgacggcggcacgacctgggttactgcaatcaagagttcgacggctggcatttgggattacacctggccgacggatatgccagagggacagcataccctgaccgtggaagtgactgacggtgcgggtaataagatgacggagacgctcaatttcactatcgatatcacgttgttaacgccaaccattgagctagcgcccgatcaggataccggacagaataagaacgataatctgaccagcgtcactcagccggtatttgtgttggggagtatcgataaagatgttcgacacgtggaattgagtattgagcataacggcacgtttaaaacggtggtactcaccgaatcagccgacggctggcgctatcgaccggattctgctttggcggacggtagctacacattcaccgtgacggtaacagatgtggcaggcaaccagcaaacatccgcgcctttaaaggtgacgatagacggtacgttgactacgccggtgattgaactggcagctggcgaagatagcggtactgttggcgatcgcctcaccaatcacgatcggcctgtgttcgacatacatcaggttgattctgacgttacgcgcgtgatggtcaaagtaacttacaacggtaaaacgcacgaggaagcggcggtattcaccaatggtcaatggcgctttacgccttctgcgagctgggctgatggctcatatcagttagccgttgtggtggaagatctggcggggaatgtaaaagagtctgcgccgtttgaggtgcgtattgataccacgacaaccattaacaatatcgtattgcttaatgataccggcgtgcagaatgatcaattaacgaatgttgccaaaccgtcattcagaattgacgttcccggtgatgtcgtccaggtacgcgtaaccctggatggtggcgctaactggaatgtgatacgcaaaaatgccgacggacagtggatttttgacagcccgaatactctggttgacggcacatatacccttcgcgtagaggccacggatgaggcaggtaatattgcgaataaagatttagtatttaatatcgatactaatatacaggttcctactattgctttagacgcaggacaagataccggagcgaataccgccgataatattactaatatttcacgacccacctttacgattggtaatgttgaccccgatgttatcaaagtcgtggtgacgattgatggtcatgattataacgcgactaaggttggggctggttggcaatttacaccaggcaatgccattccggatggttcttataatattaccgttacggttgaagataaggccggaaataccgcgacatcgaaaccattacctgttgtgatagatacgacggctgaaattgaaagcgtcacgttggttacagatagcggtgatagcgatgtagataacattaccaaagtcgacaagccgcagtttagtattgttaccgctgatgatattacccatgtgcgcgttaaaatcgataacgccgctaattggattgaactcacaaaaggaggggatggccgctggatatttaatgtcggttcggcattacctgatgggcaacacactctcttggttgatgtgactgatatcgccggcaacgttgcgcaagaaacgctgcagtttacgattgatacgactctgcgagagccgacaattgtactcgatcccacccatgatactggtgatgatactaatgataatcttaccaggattaacaaaccggtgtttattatcggtaatgtcgataatgatgtatcacacattgtggttcatattgatggtcgggattacaccattgaaaactcaggggggaatttaacctttacgccggatcaaccgctgtctgacggtcagcatacgatctctgttaccgtaacggatattgctggtaataccaaaacatcggccgaactgcggattgaaatcgacacgcaggttcagattgacagtgttacgttaacaacagatagcggcgtcaacgatcacgataatgtcaccaatgctacccgtccctcttttgaaattgcaacgcctgatgatgtgacatcggtgctggtttctttcgatggcgtaaactggacgcccatcagtaaaaatgcggccgggcagtgggaatttactgcaggtagcgcattgcctgatggtcattatactctccatgtccaggcgacggatcgggcagggaatacggcaaattccacgctgggcttcaccgtggatacgcagattgacggcctgagcgtcgtgatgctggacgacgccggaaaggattctacggatggtattacgaatattacctctccacgttttgaaatttcagccagagaaccgctgcagagcgtgacggtaattttaaacgggaaatccagcacactgactcagggggcaggtaataaatggctgtttacccctgatacaccgttagtggatggaacttacaaaatagaaatagtggctgaagatatcgcaggtaataaaattagcaaagaggtatcattcacaatagacactattgtttctgatcccagtattgatttgctggatgcggatgatactggcgaaagcgctgttgataatattacgagtgtcactacaccacgtttcgttattggcaatgtacccgccgatattgatactgttgtaatcagaattaacggcgtttcttatccggttacggcaaatggcaataacctctgggaatttcaggttcccgttgcgttaaacgatggcgtatatgaagccgttgttgtcttcagagatattgccggaaatacttctgaaactaagctgccctttaccattgataccacgacaagcgtcagtgtcagaatggagccagcgtctgataccggaaattccaatagcgataaccttacgaataagcaaaatcccaaattcgaaggtactgcagagcccaatgcgaaactggtgattaccattgttgacgataagtcaggtcgggaggttttaaaacaaacgattacggttggcgctgatggcaactggagtgtgacgccgaatatactgccggatggcatgtataccatcaacgtcgtcgcaacagatgtcgcgggaaatactgcgcaaacgcaggaaagattcactatcgatacggttacgatcgatcccaccattcgcctttcggatccatctattgatgatcagcatgaagcaaccagcctgcgtcctgagttcaaagggtttgccgaagcgttctcgacgattatgattcagtgggatgggaaagtggtcggctcggcaaacgccaatgcgaatggcgaatggagttggacgccgccatcagtattagcgccaggctcctatgttgtgagcattgttgccaaagataaagcgggtaatgaatcgtcgcaggtcgactttcctgtcgtaatacctgttattgatgtcacgcctccaaccataaagctcagcgaggagagcgatagtggcgccttaggagactttaccacgaataataaaacgccgaccctgattgggagcacgttacctaatacgattgtgagtatttatgtggatggcgtgaaggtcggcgaggcgacagcggatacagcgggtcgatatactttccagttatcggaaatgaaagatggccattatgtcgtccaggtgggtatcgtcaaccctcgcgataatagcgaactgcgttctaccgccgttgatgtcactatcgataccgaggttgctgaactggtatggaatatatctggaatgcatgagggcggatatatcaatacggtgacgccggagattggcggcaccagtgagccaaacagcaaaatcactatctttgtgaatggcgttgaaaaagcgattgcttatacgacaggcgcaggacactggggcgtagtattacccgctttgggtaatgacggtaattatgaattaacgtttaaagttgaagacgttgccggtaatatcagagagtttggtccgcagaatgtaatactggatacagtaatttcgccgttaaccgtggtattacgcgaagctgatgacagtggcaaagttggcgactggatcaccaataaatctcatgtcaccatcgatggtactgccgaagccggaagtactttaaccatcaggaatccgcagggagtggttattgctaccctggtggtaggcaatgatggtcgatggagcgcagaattagatctgcgtgaaggtagtaatgcctttgtcgtggtatcggaagataaagcgggcaacagtcaacaaaaagagattctgatagaacatgatacgcagattgaaatcagcgatatttcattaagtcgggatactaatagcggtgataaatatgatctgattaccaataataagtctccggtactggttgccatgaccgatcccggcgcgacggtacaggtttatattaatggtgtgttacaaggcacagtagaggcgagttcgtcaggtaatattagctataccatgccggcaaatagcgccgacggcgagtatcaggtgcaatttgttgctacggatactgctggtaaccgggttgagtctgcgattacaaccgtgacaatcgattctcaaattgctgtctttgatattgatgaagattcattaccggccctctctaataaccgagcgttgtcagtctcaggtgtcggggaggctggttctcaggtcagcatctttgtcgatggtaaattagtcaacgttgttatggttgaggctgatggcacatggcgcgcgccgatactgctgcaagatgatggtacgtttaatattcatttcagcattactgacgttgctggcaacactgaagtgagcaaggattatagcgtggatgtcgattcatcaaccgacttcccaacgctcaaccttgaagatgcaagcaactctggttcacttgacgatctgattactaatcacaacaagcctgtattagttggcaccgcagaagcgggagccacaatccatatttatgtggatgaaaagatcgtggcaaatgttcttgtgcttgaagatggaacctggtcctatcagtttgataatgcgttaaaagatggtgaatattctatccgtgtggttgccgaagacccggcaggtaatacggcagaatcgcctcgcttactcgtcacgatagataccagtacgtttatcgataatcctgctatggtggcaggttctgataatggtattttcagtaatgatagtataacgagtcagacccggcctacgtttagtatttttggagaaatgaaccagagtgttcagattttcattgatggagtgctagtcgatacgatcacggtgaccgacagaaatcaagtttatcgacctgagtcaccgttgggcgatggttcccatagcatttattatgttatcaccgataaagcaggcaacacggctacctcgaaaacgctaaactttactatcgatacctttaatacgacgcctgtcgccattgattctatcggtggacaaacgttagcagagatgaccggtagtgatggcaaaatatatataacggacacgacgcgtaacttattgtttagtggcagtgccgagcccaatagcaaaatagaaatcatcattaatggcttaaatgtgggggaagtttgggttaatgaaaaaggccactggcagatgccggtgaacccgctttatttcacagaaggccaactggatatcactgttaaatctacggaccgtgctggtaacgtaaatcaggaaaagtattccatttgggttgatacgcatatcaaggtatttaccagcgagcttgatgacaataaatcatcatcgaaaacggaatggtggagtaatagcgatctcattaccatgcgaggcacgggtgaaattggcgctacggtatcattaatcgtggctggcgtcacgctggcaactgctgttgtggcggcaacaggacgatgggaattatcaacagacaagcttccagaagggacttacgatattagtttggtcattgaagatagcgccggaaatcgttgggaagatgtgcgtgaaatatttattgaccgaacgccgccaaatgctccggtcgtaacgtattcagatattgtcaacgatctaattattatgcaggggacggcggaagccaaatctcagctaataataaccgatagtgaggggaatacttatacgttaaccgttcctgataatggtaaatggagtatggctatcccgtatccatcagaagggaagtttaccattacgagtgtggatgctattggtaaccggagtgatgatgtccctctcgatatcatgaaagaggttcccgttatttcattatctccagactcagacagtggtacggtgggcgataatattacgcgagataagcaacctacctttattatcgggaatctggaaagcgatgttgtggtcgttcaggtcgatatcaatgggaccgtatataatgctgaaaaaaatgccgatggcgtttggttctttacgccaggtacaccgttagctgatggttcctatacgatatcggtaatcgcaagcgatgccgcgggtaatcagaaaaactcgttacccattactgtcacgatcgacagcacgctgacggtgccggagattgcgttggcagcaggtgaagacaatggcgcttcagacagcgataacgtgacgaatcacacccagcctaagttcacgctgcagcatattgatgctgatgtgaccggggtgaccgtaaacgtgacgcataatggcgtgacagacatctatcaggcgacgcaaggcgcggatggctggaccttcacgccgccagccgcctggaatgacggtaactacacgctgagcgtgacggtggtggatcgcgcggggaattcacagcaatctgcttcgctagcggtgacggttgactcaacggtgacggtaacagcggatagccagcatgacgatgcgagcgatgacgccacggcaacagcggttactccaccggagtctgaaacagtgaatgccgaaagcgctacgcatcttcgtacagagccgtctgcggcggaagaaagcgtggtgaaggtgacagcctatagtattacattgttaaacgctgactctggggatgaaatagatcgttcaattagtcagacaccttcttttgaaatatcagtacctgagaatattgttaatgtcagtattatgtttgaaggagaagagtttactctgccgataactaaccagaaagcaatattcgaagttccgctatctttggaagatggtgaatatactatggacgtgaaattcattgataaagacaatgatttcctgattaaggagaaaacattctcagtcgatcactcctcggcggatattgtgaacgcaatgaatgtaagaggaaagaccgaggatgatattaatgattccccttccacgagttctgtagggcacaacaataacggcgctattgatgttttcgccgttaatgaagttacgctacctgtagataatcaagaagaacacgcataataacggaggcccctcacctttgggtgagggggtttacttatggataaaaaactagaaccttattatttaagtgcggaaacggcattatctatagtgtctaaaaaattcaacataaaaattgacatcaaagaggatgatataaatttaagatttaaaaagtacgacagaaataacactgacgactctatacaaatgaagaatttctttttgtcgttagggctttctctacaggatatattatttaataatggtgaggatttactaaatgagcctatgccgattttactattaacaccagaaatgaagtggatggtgtgtgtgagtggcgggcaaaaaataaagttggtaaacgcgcgcggtgaactctgttatgttgaaattgaagatgaatatttaaaagagttatctgcatttagtatactacctttaaataaagttgttgatagtataagagtaaaaaatatcataaaaaactctttatcgatgaacaagattttttatactaaatactttttttcatctctttttatggcaatttttgcgttaactatcccagtatttagtaatctgttctatgataagcttgttccaagcgcttcggtttcatctttatttggcgtggctataattgttgctgtatttattgtttttgagtttatccttcgtacttcgaaagatatttatcagtctatcacagcaaggcaggatgacgtcgatattgatatcgcatttcttgaagcggtactttatagtaaaaagaaaaatggcagatccatgtcatcagcatttgtgctatggaatgagtttcagaaaattaaacccgttttattaaactcgatctttcaacgtatagccgatattccaatatttattatatttctcattgttatatatgtaaatttaggtctggttgttattgtacctattaccatgtttatcgtctctattattatttccctcgttaaccaccattatactaatgagttaatgaacaaacaaaaagaaggacagaagaacaggaatatttttatctcagaagttttcttatctattaaaatgatccataccttaaataatcaaggtttactttttgattgggttaatacatcaaatgaacagtcgtatcttaacctgaagataaggaaattaaatcttatctatcaatctatattggggagtatgtcatctattacccaaataactattatggtaatagccttttttatggtaatcaagggtgatgttactactggcgcaattgtttcatctgtcattgtctctggccgtatttccgggatcatttcgaatttttcttctacattaatctctattttatcagcagaaaaaaccggtaaggatctgctttctttttttgatgaagatcaggcagaaaaaacaccggcattacagtcaatatcaaagtgcaatggcgatatctctatccggggcgtgagttatcagtatgatgctcaatctccgatgattattaaccgactgtctatagacatacctgcggggcaacgtgtcgcggtggtaggcgaatgcggagcaggaaaaagctcattactgggaatgctatctggctacctttcgccaacagacggtgccattttatatgatggatataacttaggacatttatcgcagaactttttttctcagcatttaagcgtggtgacgacacatgatgttttattcaccggaaccattgaaagtaatttcgcgttaaaaccgcaaaacgacaggggccgggtactcaaggcgcttcagctggcgaactgtggttttatcttgcaacatcctatggggctgaagtttccggtgaattttatggctaaaaacctgtcatccggacagcagcagcagttattattagcacgtagtctgagtagtgacgccagcgtctttttatgggatgaaccaacatcaaatctggatgagaataccgagaagcaaatttttgataacttagatgagtttattcatgggaaaacgttgatcatggtgacgcatcgtcgatatctgataaagtattttgaccgggtcctggtaatgaaaggtggaaaaataatccgtgattgttctccggataaattattaatgtaaaataagcagcgcttgtcgctgttatcaggtggtactgcttaataaaaaagacccgttgcacaaacgggtcttttttgtcatttaacgagtcggcaacgtcttcaataagtttagctcgattctgttagggctattccacttgccatttttggataaccacacctggcggccctcatcaacggcaatgcgagggacgtgatggtgcgcaaggctacccctggcgcgcgattccgcgttgagataaccggtgggcggcttcagcggcagcgatagcgtatcaggtcagcaccatcggccattctggcggggtctggctcatcgtttcgaccattacggcttcaatgttatgccagatcgcagcgagatccatcatggtaataccgagtaaaccggtggcaaaccagcaggcggataccacgcccagaccgctactgatcaccgccagaccaatataatctgatttacggaaacggatattgagcgtgctggctaaaaacatgagcacggcgctcagcagttgccagcggagaagaacgacaccagtggttatggcagccatgaaacatttcctctgaatagacctttgtccaggacagcacggcgttgttcccgggaaacgtgggacattctggctatcaacggacatcacatcaacatcgaatgaaacattgtttctatttcattgtttttgtgaactatatcacaaaaaccagcttgttcgccagatcggcaatgtattttttgtgcgttttataaccgtattttttgtgtgacttctacgcgtccgtagagaaactgccggaaagcaaagatgtattattactactcttttattttttttcgtgaaattcagacctgataaaaatatcaagttatttatcaaaagaaaggagtaaagatgtataccccatcgtttacttgagtataaatctgatattatcaaaaatatttagtgtcctgcctggtatgcgaaagagattgcgcgtagttattaatggtaaatgttgatcggtaaaagtctgttgctaatattgataaattcatgcaccgtaaacctccatttggttcacgtcttattttgccaacaatagtcacaaataatgcagggaaataggctgaaaatgagtcaaagcacacgacgcaaggtgttgagatttctcggaacgatcattgtggtgttacttcctatattgctggcgatctggtttgctcatatccgggcagtctctgaaaccagaaatcagttacattcatttgcgcagttggtattagataaaacggagcgggttatcctgcaagcagatttagcccgcgatgccgctgaacaatatcaggggcaagcctgtacgccagcccatcaacagcgaatgctgaatattatccgcggtcgtttgtacattaatgagttgatttatgctaagggccagcgttttctatgctctacggttatgacgccaacaagtccttattttattccccgcgctgactataaacgaaagcctgacatcgctatttattactatcgtgatacgccttttttcaacggttataaaatgacatatatgcagcggggaaactatgtcgcggttatcaatcccttatcttatagcgaggtgatgtcagacgatccggcgttggcctggggaatgtatgatacggtgaccaacacctttttctccctgagtgaacaggcgcaggctgatcagctattacctttggtacgacggagtgaacctgtgttccaacagggtgagcgtttttatactctggttaaatcagcaaaacgaccggttgccgcgattgtgtcaacctcaaagcaacgcttttaccagaacctctttcatcagcttacgttaacgctaccgttagggatcatctgtagcattatcatcttatttatgtggtcacgatcccggcaggcatattactcaccgcgtcgattgctgcaacgggccattaccaggcaccagctttgccttcattatcagccgatcattgatatccgaaacgggacatgtgtaggtgccgaagcgctattgcgttggccgggctatcacggtccggtgatgagcccgtgcgaatttattccgctggcggaaaaagaggggatgattgagcagatcaccgattatgtcgtcgaagaggtatttaatgatttaggtggttttctggccgcgcacccgcatctttatgtctctatcaatctcgctgccgccgattttctctcttcccgactaattgtgatgattcatgaaaaaacgcgtcagcattcagtgcttgcgcaacagataaaggttgaagtgactgagcgcggatttattgatgtgcctaaaatgacgccgattattcaggcgtttcgccaggcgggatacgaggtggcaattgatgactttggtaccggctattcgaacttgcataacctgtactcattaaatatcgaccttttaaaaattgataaatcttttgtcgacacgctaaccactaatagcgccagccatttgattgtggaacatattattgaaatggcgcaaagtttgcggctaaaaatcattgctgagggggttgaaacggctgaacaggttagctggttgctaaaacgcggcgttcagtattgtcagggatggcactttgcgaaggcgttaccaccgcaggaattcatcgcctggctacaacaaacgcccgcgcctctgacgatacgcgggcagacgccctacaggcggtgacggtaatcgctgggagtgcgatcgaactcgcggcggaatacacgcgagaaggtttgctgcgatacatagcccaggtccatcgcgatatcaaaaatcgggcgctcggtcgttcgtagctcaacggccgccaacaggagacggcgctggcgaatatactcgcctaatgtttgatgcgttaccgtacgaaacatccgctgcaaataccacttggagtagcccgatttttttgccaccacatcaatgtttagcggttggtcgatatgttcatcaatccattcgataagggtctgaattatctgctgatgcgacatattgttgcctcttaaacagtattcgattcgtcgttttgtctgcgggcgagtataattcctcaagttaacttgaggtaaagcgatttatggaaaaaaaatctccccgtttaaaagccttactgacgccgggggaagttgcgaaacgtagcggtgttgctgtgtccgccctgcacttctatgaaagcaaagggctaattaccagtatccgtaatagcggtaaccaacggcgatacaagcgtgacgtgttgcgttatgtcgcgattatcaagatcgcccagcgtatcggcatcccgctggcaactatcggcgacgcgtttggtatcttgccggaaggacatacgttaagcgcgaaagagtggaagcagctctcatcgcagtggcgcgaagagttagaccgacgtattcatacgctggtggcgttgcgcgatgagctggacggttgtatcggctgcggctgtttatcgcgtagcgactgtccgctgcgaaatccaggcgacaggcttggcgaacacgggacgggcgcccggctgcttgaagatgattaacatgcactcggccatcgggctgagctcacctaaaactaaagcgccgctaagggcgctttagtttgtttccggtctttgtctttcgctctatcccgctgattacaggagggtttcccccgacgtcaacacccctcatatcgagcacgtggtggaggttccggtttgtgttgatactgtaagtgtaagcgacgacgccctgttcgccagcgaaatgctgattttttagccgaaatttttacggcaactgccataattttctatagttagttggcataccttacaggagacagccatgctgacggtgcaccatttaaatcagtctcgttcgcagcgcatcttgtgggcgctggaagagctggcgttgccttaccagattgtgcgttaccagcgtgaaaagaccatgctggcgccgccggcattgaaaaaagtgcatccgctgggcaagtctccggttatcgaagatcacggtatggttattgcggaatcgggcgccatcctggaatatttgcaggacacttacgacagtatcggacgctttaaacctgcggatgcgcaggggaaacaacactatcgcttctggctacattacgctgaaggttctctcatgcccttgctattgatgagactgctctttacctctctgggtaaaccgccggtaccattgggcctgcgaacgttgggcggcgttatcggtaagggcgcgcaaaaagcgtacctcaatccgcaactggaaacccatgcgcgctttattgacgggcatctggcaaatcacccctggtttgccggagagcagttaagtatggcggatatccagatgagcttcccgctatttgcgctgcttgcccgaggcggaatcgctcatctcgaccatatcaacgcatggaaagcgcgggtagaaatgcgtccagcctggcagcgagcgattcagcagggcggtccgtttaccattcccggcggataatggcgtttttgtgagcagattgcgcaacgtatttgctaacagcgatgcgaaaaattgttgctggattgcgcagggacgataacgtttgcgcatcgtctggcgatttattgagcatactaagcagaaaagcataaaaagcggcaaagttcagttgaaaaagcgttgatgatcgctggataatcgtttgcttttttttgccacccgttttgtatacgtggagctaaacgtttgcttttttgcggcgccccggttgtcgtaaatgtagcacaaggagataacgttgcgctgttagtggattacctcccacgtataccgacgaataataaattctcaggggatgttttctatgtctacgccttcagcgcgtaccggcggttcactcgacgcctggtttaaaatttcacaacgcgggagcaccgttcgccaggaagtcgttgctggcttaaccacgtttctcgcgatggtttactccgtcatcgtggtgccagggatgctgggtaaagccgggttcccgcctgctgccgtctttgtagcgacctgcctggtcgcaggcgtcggctctattgttatggggctttgggcgaatctgccgctggctatcggttgcgctatctcgttgacggcgtttaccgcgtttagcttggtcctggggcagcatattagcgtcccggtcgcgcttggcgccgtattcctgatgggcgtactgtttaccgttatctccgccaccggcattcgtagctggattttgcgtaacttgccgcagggcgtggcccacggaaccggtatcggtattggcctgtttttgttgctgattgccgccaacggcgtcggcctggtcattaaaaacccgctggatggcctgccggtcgcgctgggcgatttcgataccttcccggtgattatgtcgcttgtgggtctggctgttattctcggtctggaaaagctgaaagtccccggcggcattctgttgaccattattggcatttctattgtgggtttgctcttcgatcctaacgtccatttttccggcattttcgccatgccttcgttgagcgatgaaaacggcaactcgctgatcggcagcctggatattatgggcgcgttaaaccctgtcgttctgccaagcgtactggcgctggtgatgacggcggtgtttgatgcgaccggcacgattcgtgcggtcgcagggcaggctaatctgctggacaaagacggacaaattatcgatggcggcaaagcgctaaccaccgactcactgagtagcgttttctccggcctggtcggggcggcgccagccgcggtgtatatcgagtctgcggccggtacggcggcgggcggtaaaacgggcctgacggcgattaccgtgggcgtgctgtttttgctgatcctgtttctttcgccgctctcttatctcgttcccgtctatgcaactgccccggcgctcatgtatgtcggtctgctgatgctgagtaacgtggcgaaaatcgattttgctgatttcgtcgatgcgatggcggggctggtaacggccgtatttattgtactgacctgtaacatcgtcaccgggattatgatcggctttgccacgctggtcgtcgggcgtctggtttccggcgaatggcgtaaactgaatatcgggactgtcgtcattgcggtcgcgctggtcgctttttatgccggcggctgggctatctagctctgccttcattctgaaaaacgggcggcgttggccgcccgttttcattttcaggacacatcacgttaccttttgcgttaatctgaagaaggtgaaaccgaggcatgatgcctctctccatcataaaaaacatcgcaaacagggaacgcatggaaattttcttcacaatactcatcatgacccttgtggtctcgctgtcgggggtatttacgcgtgtattacccttccagcttcctttaccccttatgcagatcgccgttggcgcgctgttggcgtggccgacgtttggtttgcatgtggaattcgacccggaactcttcctggtgctgtttattccgccgctgctgtttgcggatggctggaaaacgccgacccgtgaatttcttgagcatggacgagagattttcgggctggcgctggcgctggtcctggtaacggtcgttggaatcggcttcctgatttattggctggtgcccggcattccgctgatccccgcctttgcactggccgccgtgctgtcgccgaccgatgcggtagcgctctccggaattgtgggcgaggggcgtatcccgaaaaaaatcatgggcattctgcagggagaggcgttaatgaacgacgcctccggtctggtatcgctgaaattcgccgtcgcggtggcgatggggacgatggtctttaccgtcggcggcgcgacgctggaattttttaaggtcgctatcggcggtattctggcgggttttgtagtcagttggctgtatggccgctcgctgcgttttttgagccgctggggtggcgatgaacccgcgactcaaatcgtcctgctgtttctgctgcccttcgcgtcttacctgattgccgaacatattggcgtctcaggcatcctggccgcggttgccgccgggatgaccatcacccgttctggcgtaatgcgccgcgcgccgctggcaatgcgtttgcgcgcgaacagtacctgggcgatgctggaatttgtctttaacggtatggtctttctgctgttgggactgcaattgccagggattctggaatcttcgctggcggcggcggaagctgacccgaatgtcgaaacctggatgctctttaccgatatcgtgctgatttatgcggcattgatgctggttcgcttcggctggctgtggaccatgaaaaagttcagcctgcgctttttgaagaagaaaccgatggagttcgccagctggacgtcgcgtgaaattctgattgcttccttcgctggcgttcgtggggcgatcaccctggctggtgtgctctctataccgttacttttgccggatggcagcggatttccggcgcgttatgaactggtattcctggcggctggcgtcattctgttctcgttatttgtcggcgtgatcatgctgccgctgctgttgcaacatctggaagtcgccgatcatgcgcaacagttgaaagaggagcgtatcgcccgcgcggcgacggcggaagtggcgattgtcgccattcagaaaatggaagagcgtctggcggcggataccgaagaaaacatcgataatcagttgcttactgaagtaagctcacgtgtcattggtaacttgcgtcgccgtgccgatgggcgaaacgatgtcgaaagctccatacaggaagaaaacctggagcgacgtttccgtctggcggcgctgcgttccgagcgcgccgagttgtatcatctgcgcgccacgcgagaaatcagcaatgaaacattgcaaaagctgctgcacgacctggatttgatggaagcgctactgatagaaaatcagtagtccttgtggcccggtggcgccatgctttccgggcctacaagtaggccggataaggtgcttgcgccgccatccggcaagggtcttaacccatggcttacggttgtttcagccaaaacccttcgcaacaggttaaccatgcccgggcgctgtgcgacagatacacgccctctcgccaaatcatgcccaactgccagcggagatcgctttccagcggtagccagcgcagcgtggccttatccagacgctgacaaatcggctccggcaaaatggcgatgccgacgcccgcttgcaccatggcggcgagaaaatcccattgcccgctgcgcacggcaatccgtggttttacgtcatgctggctaaataaggtcatcaactggcggctcagggcaaagtcttcgttatagataagaagaggatgctccgccagagcttcaggcgcgatggagtcgccggttgtccactgaccggaacggggaaccagcacgcacagcggatggctgaacagcgataacgtcgtcagcccgctcgcttcttccaccgggagcgcggtcatcgcaacatccagctcgccattcattaccgcctgctgtaccgtcaggccgccaaactccgaaattttgagttcaacgccagggtagcgttgtcgaaacaaactgattggcccggccatcaacatgccgaccatcgggggaatacccagccgcagcacgcccttattgagatggttaatatcgctcaactcggcctctaactggcgaaactcagcgaggatcgccagaccgcgttcaaacaccacgcgtccggtatcggtcagcaataacttacgtccgtcgcggatcagtagcgtacagttaagctcatcttcaagatttttcagcattttgctaatggtgggctgggtgacaaataacttctccgctgcgcgggtgaaactttgctggcgcaccacctcgacaaaataacgcagcgttctgatatccatgattattccttccgactatgcctgcaatgattttaattcatttctgcccgtgacggaggttctctatactggcgctccgtattatttttcaggacattccctcatggctgtggcgataagccgcgttacgcctgccgttgtgcaacgactccaggtaccggttcaggtactgctctatgcaggtttattcattttttcccaatatcttgtctcctggctgcacctgccgttgcccgcgaatctggtcggcatggtgcttatgttggcgctgatcgtttgccggattattccgcttagctgggtacgcgcaggcgcacgctggctgctggcggagatgctgttattctttgttcccgccgtcgtggcggtagtgaactatgcccatctgttactggtggacggctggcgcattttctcggtgatagcgatcagtaccttaatggtactcggcgcgacggcgtgggtggtggataaagtgtatcgctatgagatgagcaggctaaaccgtgaataacgttcagttaagcgtactgtgcctggtgattacgctgggaatttatttcgccaataagcgcctgtatcgccgttttcgcaaattgccgttgatgccattagtgctgacgccggcactgctggtgttaatgctggtgttcggtcatatctcctggcaaaactacattggtgaatcgcactggctattgtggctgctcggcccggcgaccattgcctttgcggtgccggtgtacgataacctcgcgattatcaaacgtcactggatgtcgctcaccgcgggcgtagtgacggcgacggtggtggcagtcaccagttccgtttggctggcgcgtctgttcacgttatcggatgagattcagcgtagtctggcggtacgttccgttaccacgccgtttgcgctggcggcggcagaacccctgggcgggcagccagatctggtggcgctgttcgtggtcgtcactggcgtgtttggcatggcggtcggcgacgcgctatttttgcgtctctctatccgggaaggcatggcaaaaggggcaggattcggcgcggcgtcacatggggcgggcacggcgcgttcctatgaacttggtcagcaggagggcgtcgtcgccagtctggtaatgatgctgtccggcgtggtgatggtgctggcagccccgctggtggcgagggtgatgttctgattttcctccgacccacagggccggaggaaacggtaagattaatgcgcacgcccttgttgtacgccgaatcccgtttgggagcggataaactgagcgcggaactgctcacgttcacggttgccttctgccgagttatcggtggccgagaagaaccagatccccaggaacgccacgctgatagagaacagcgccggatactcatacgggaagatcgctttttcgtggccgaggatctgcacccaaatggtagggccaagaatcatcagcaccaccgctgtcagtaaacctaaccagccgcccagcatagcgccgcgcgtggtcagttttgaccagtacatggaaagcagaatgatggggaagttgcagctcgcggcgatagcaaatgccaggcccaccataaaggcgatgttctgattttcaaacaggacgccgaggataatggcgatcacgcccagcaccaggacggtgattttcgacaccttcagctcttcacgttcggttgcgcctttgcggaacacgttggcgtacaagtcatgcgacaccgccgatgcgcccgccagcgtcagacctgcgaccaccgccagaatggtggcaaacgccactgccgaaataaagccgaggaacaggttgccgcctaccgcgttggccagatgcaccgccgccatgttattgccgccaatcagcgcgcctgcggcatctttataggcgggattcgcccccaccagcatgatagcgccgaagccgataataaaggtcagaatgtagaaatagcccataaaaccggtggcgtagaacacgctcttgcgcgcttcgcgggcatcgctgaccgtaaagaaacgcatcagaatatgcggcaagccggcggtgccgaacatcagtcccagacccaacgacaatgccgaaatcggatcttgcaccaatcctcctgggctcataatcgccgtgcctttcgggtgtaccgccatggcttcggtaaacagattattgaagctaaagccgacgtgtttcatcaccataaaggccataaaactggcgccaaacagcaacaggacggctttgataatttgcacccacgttgtcgccagcatcccgccgaacagcacgtacatcatcatcagcacgccgaccagcaccacagcgatgtgatagttgaggccgaacagcagttcaatcagtttaccggcgccgaccatttgggcgatgagataaagcgccaccactaccagggagccacaggccgaaagaatacggattggcccctgtttcaggcgataagaggcaacgtcagcaaaagtataacgtcccagattacgcaggcgctcggcaatcaaaaacaggatgattggccagccgacaaggaagcccagcgaatagatcagcccgtcataaccggaggtaaacaccagcgcggaaatgccgagaaatgacgcggcagacatatagtcgccggcaatcgccaggccgttctggaacccggtgatattgccgccagcggtgtagtagtcgctacgggaacgtacgcgtttagaggcccagtaggtaataccgagcgtaaacacgacgaaaatcaaaaacatgataatcgcctgccagttggtgggctggcgttcaaccgcgccgctaatggcatccgccgcatgagcggcgaaggggagtgcggcggcaagcgccgtcagaactctcttcataatactttcacctcatgcagtacggcgttattaagacgatcgaattcgccgttcgcccgccagatataaattccggtcaacacaaaagaaatcacaatcaccccgacgccaatgggaattcctcgggtgacgctggttcccgcatgtagaggcgtgcccagccagccaggcgcgaaggcgatcagtaaaataaagctgatataaaccgccagcatgataaccgacagaatcgtggcaaaccgttgccgtttttcaactaattccctgaaacgcgcactgtcttctatccgctgataaatttggtcattcatcacagagctctccagaggtccccctgcgtctttcgcgctacaggcgcgttggccgcactcgcgcgccccagccacatagtgaacttgaactatgctgctgagggtgtgctcgcttgccgccttcctgtaacacgaaatcctttgggggagggttttttatatttccctctcccggtttgagagagggcaggggtagggtcgtaggccggataaaacgcgttcgcgttgccatccggcatttatggttatgacggcatcgcgatggcctgcttctcttcgagcagtttctccaccacgccaggatcggcgagagtcgaggtatcgcccagattgctggtatcgcccgccgcgattttgcgcaaaatgcggcgcataattttgccggaacgggtttttggcagtgagtcggtccagtgcagcacgtccggcgtcgccagtgggccaatctctttacgtacccagttgcgcacctccgcgtacagttctggcgacggctcctcgccgtggttgagcgtcacataagcgtaaatcgcctggcctttgatagcgtgtggaatacccaccaccgccgcttcggcgatcttcggatgcgccaccagcgctgactcgatttccgccgtacccagacggtggccggagacgtttaacacgtcgtccacgcgaccggtgatccagtaatagccgtcctcatcgcgacgcgcgccgtcgccgctgaaatacatattcttaaaggtagagaaataggtctgctcaaaacgttcatgatcgccgaacagagtgcgcgcctggcccggccaggaatcggtgatgaccagattgccttccgtcgcgccttcttgcggatggccttcgttatccaccagcgcaggctgtacgccaaagaaaggacgggtggcggaaccggctttcagttcgatagcgcctggtagcggcgtgatcataaaaccgcctgtttcagtctgccaccaggtgtcgacgaccggacatttttccttgccgatcttcttccagtaccattcccacgcttcgggattgatcggctcgccgacggaacccagaatgcgcagtgaagaacggtcggtgccttcaatggctttatcgccttccgccatcagcgcgcggatggccgtcggggcggtatagagaatgttgacctggtgtttgtcgaccacctggcacatgcgagcgggcgttggccaattcggcacgccttcaaacattaaggtggtcgcgccgcaggccagcgggccatacaacagatagctgtgccccgtcacccaacccacatcggcggtacaccagtaaatatcgccagggtgataatcaaagacatacttaaaggtggtcgcggcgtagaccagatagccgccggtggtgtgcagcacgcctttcggcttgccggtggagccggaggtataaaggataaacagcggatcttcggcattcatcgcttcaggctggtgctcagggctggctttttcaatcaaatcgcgccaccacaggtcgcggccttcttgccagtcaatgtcgctgccggtgcgcttcaggacgatcacatgctcaacgctagtgacattcgggtttttcagcgcgtcatcgacattctttttcagcgggatactgcgtccggcacgtacaccttcgtcagcggtgatcaccagccgcgagctggagtcgataatgcgtccggcgacggcttccggcgagaagcccccgaagatcaccgaatgcaccgcaccgatgcgggcgcaggccaacattgccaccgccgcttccggcaccatcggcatataaatcgctaccacatcgccttttttaatgcccagatccagcagcgtattcgcgaaacggcagacatcgcgatgcagttcgcgataagagatatgtttactctgcgacgtgtcatcgccttcccagataatggcggtgcgatcgccattttcctgcaaatggcggtcaagacagttcgccgccagattcagcgtgccgtcctcgtaccatttaatcgacacattgcctggcgcaaaggaggtgtttttcactttttggtacggcgtgatccaatcgagaatttttccctgttcgccccaaaacgtatcggggtcgttaatagactgtttatatttagtctcatactgctctggatttatcaggcaacgatccgcaatgttggcgggaatggcgtgtttatgtgtttggctcatgctgttgttctccttgtaggatgttaataatatgtcgcataaacgttaaatgtagggtcttaataagttttgtttagtatttgggcgacagatcacgcaaaaagggaactgtgcaaataagcagcaatctattttttgattgtgtcccgcaaaattagataaattttcgggataacatgacgttatatgaaattttttaaaaaagtgatccgtgtccggaaatcagaaaagagagggagttttgtccaggttactaactctaaagtggtattttacatacacttacaattgattaaagacaacattttaagtgtggttatttgttacacatagaggagatcaatgtaataacagtatttgtgcggttgctgttatggaaaacgataaaaaatcgccattaaagataatggcgcaatctggatgagacctctatggcaaggaaaacactacgcgcacgccgtttcttcagccttatatttccttttttcttcattacctctgtttacgctgagcaaacgcctgaatccgcaaaaaccgttactgttgaagcgaaaaatgaaatgttcgcgcctcaacaccccgaccaatatcagtcatggaaagcgacgtcagaacagtctgcccgtgaagatgcgctggcggaagaccctcgtctggtgatcctgtgggcgggctatcccttctcccgtgattacaacaaaccacgcggccacgcgtatgcggtaactgacgtgcgcgaaacgctgcgtaccggcgcgccaaaaacggcggaagacggcccgctgccgatggcctgctggagttgtaaaagccccgatgtcgcgcgccttatccaacaagaaggcgaagacggctacttccatggcaaatgggcgcgcggcggcccggaaattgtcaacgatttgggctgtgccgactgtcataacaccgcgtcggacgatttcgcccaggggaagccagcgttaacgttgtcgcgcccctatgccgaacgggcgatggaggctatcggcaaaccgtttgataaagcgggacgatttgatcagcaatcgatggtctgcggtcagtgccacgtggagtactactttgacggtaaaaacaaagccgttaagttcccgtgggatgagggcatgaaggtcgaaaatatggagcaatactacgacactatcgccttctctgactggactaactctctgtcgaaaaccccgatgctcaaagcgcagcacccggaatatgaaacctggagcgcgggcattcacggtaagaacaacgtgacctgtatcgactgccacatgccgaaagtacagaacgccgaaggcaagctctacaccgaccataaaatcggcaacccgttcgacaatttcgcgcaaacctgcgccaactgccacacccaggacaaagcgtccctgcaaaaagtggtcgccgagcgtaaacaggcgattcatgacctgaaaatcaaggttgaagatcagctggtacatgcgcacttcgaagcgaaagccgcatgggatgcgggggcgacagacgcggaaatgaaaccgattctgaacgatattcgccacgcgcagtggcgttgggatctggcgattgcgtcacacggtattcatatgcatgccccggaagaaggtctacggatgttaggcagtgcgatggataaagccgcggatgcccgtactaaactggcgcgactgctggcgaccaaaggcattacccatgaaattccgctgccggatatttcgacgaaagagaaggcgcagaaagcgattggtttgaatatgcaacaaatcaacgcggagaagcaggacttcctgaaaacggtcgtaccgcagtgggaagatcaggcgcgtaaaaacggtctgttaagccaataacctcacatgtgacaaatttgccggatgacagcgcaagcgctttatccggcctacagaagtcttgtaggccttaaagctgcgcgccatcaggcattatgtaatggagtgaatatgagcgtattacgttcgttattaactgctggggtgctggcgtcaggcctgttctggagcctgagtggaattactgccacgccaacgccgcaggagtcggatcaacgctggacggtcacccagcagcgtaatccggatgctgcctgtctggactgtcacaagccggacaccgaaggtatgcacggtaaacatacgggcgctatcaacccgaacaataaattgccgataacctgtaccaactgccacggtcaaccgtcgcttcaccaccgtgaaggggtgaaagatgtgatgcgttttaacgacccgatgtatacggtagagcagcagaacagcgtctgtatgtcctgccacttgcctgaacaactgcaaaaagcgttctggccgcacgatgttcatgttactaaagtgacctgcgccagttgccattccctgcatccgcagcaagacacgatgcagacgctaagcgagaaagggcggatcaaaatatgcgtggattgccacagcgatcagcgtactaacccgcactttaatccggcgtccgttccgttgcttaaggagcagccatgagttgcacccgacgtcaatttattacccgcgtcggcgcgctggcggcggtcagtgggatggcaggacgcgttgtagcgaacacgttgaatattaatggcgtgcgttatggcatggtacacgatgagtcattatgcatcggctgcacggcctgcatggatgcctgtcgggaagtcaacaccgtgccggaaggcgtatcgcgcctgacgattattcgcagcgagccgcaggggacgtttcctgatgtgaagtatcgcttcttccgccactcgtgccagcattgcgaccatgccccctgcgttgacgtctgcccgacgggggcatcattccgcgatgccgccagcggtattgtcgacgtgaatccggacctttgcgtcggctgccagtactgcattgccgcgtgtccctaccgcgtgcgctttatccatccggtcagtaagacggcggataaatgcgatttctgccggaaaaccaacctgaaagcgggcaaacagcccgcctgcgttgagtcatgcccgacgaaggcgctgacgtttggtaatctggacgatcccaacagcgatatttcccgtttgttgcggcagaaaaccacctatcgttacaagctggcgctgggcacaaaaccgaaggtctaccgcgttccctttaactatggggaggtgagccaatgacatccgcttctgcatttcattttgcatcactggtgtgggactggcccatcgccatctatctgtttctgattggcatctccgccggactggttacgttggcgattctgctgcgccgcttccatccggaggcgggcggttcggacagtacgctgctgcgcactacgctggtgttagggccgggggcgattattcttggtctgctgattctggtctttcacctgacgcgcccgtggaccttctggaagctgatgttccactacagctttacctcggtgatgtcgatgggggtgatgctgttccagttgtacatggtagtgctggtgctgtggctggcgaaaatctttgaaaaagaggtgattgccctgcaacagcgttggctgccgcggtcagggatcgtgcagaaagtgctgacgctgatcgcgccgtttcatcgcgcgctggagacgttaatgctggtactggcggttctgctcggggcgtacaccggctttctgctgtcggcgctgaaatcctatccgttcctgaataacccgatcctgccggcgctgtttctgttctccggcatctcctccggcgcggcggtggcgctgatcgctatggcgttacgccatcgtagcaacccgcacagcaccgaggcgcgctttgtacatcgcattgaaaccccagtggtatggctggagatcttcctgctggcggccttttttatcgggctggcgctgggcgatgacggcaaaatgcgcgcgctggcggcggcgctgggcggcggattctggagctggtggttctggcttggcgtcgtagggctgggattgattatcccgctgctgctgaagccctgggcaaaccgtagcgtcacgtttcacggcgtgctggccgtttgcggcgccagtttgaccggcgtgctgctgctgcgctttttcattctttatgcgggacagctaacggttgcataatctggacatcttccttcctgaagccggatttctggcgctgttgttgagtctcggggtcaacgtgctgaccccgctggcgacgtggtgcgggatggggcagcactggcgcggcgtcatgcgcctgacgacctgcggcgcgtggacggcgttcacgctgctgctactggcgtttgcgattctggttagctgttttctgaccagcgatttttcggtcgtttatgttgcgcagcatagccatagtcagttgtcatggggactgaaactggcggcggtatggggcggtcatgaaggttcgctcctgctgtgggcgctgcttctttcggggtggacggcgctattcgcctggcgctcccggcatgaatctgacgcgctttttccgctgaccctgagcatcttgtccttcattatggcctcgctgctgctatttattgtgctgtggtccgatccgttcctgcgtattttccctcccgccatggaagggcgcgaccttaatcccatgctgcaacatctggggctgatcttacatccgccgctgctctatctgggttatggcggcctgatgaccgcggcgagcgtagcgctggcttcgctactgtgcggcggctttaacgccacaaccgcctgggtttgctggcgctgggcgttaccgggttggtgcgctctgacgctggggatcattctcggatcgtggtgggcatattgcgaactgggctggggcggctggtggttctgggacccggtggaaaatgcctcgttgttgccgtggcttgccgccagcgcgttgctgcacagtctgtatgtcagccgccagcgcgggagcttccgccactggtcgttgctgctggcgatactgacgctgatcctctcgttgctgggaacgctgattgtgcgttccggcattctgctctccgtccatgcttttgcgctggataacgtgcgcgcggtgccgctgtttatcctttttgccgcgttaagtctggcatcgcttgctctgtacggctggcgggcacgggagccgtatccggcgacgcgtttgggcggcggaaagtgcgaaacgctcattctgacgacgctgctgctctttagcgccgtcttgttgatcgtgctggtcgggacgctctaccccatgatttatggtttgatgggctggggaaggctttcggtgggcgcgccctattttaatcgcgtcacgctgccgtttggcctgctgatgctggtagttatcgtgctggcgacaatcagaagccgcaaagtctctgtgcgttgtcagcttccggcattgctggcgcatacgggcgtatttatcttcgccgccgggatcatggtttccagcggcagtcggcatgaaatcagccttaacctcagccccggtcagcaggtggtactggcgggctatacctttcgtttcgagcgtctggatctggaagccaaaggcaactacaccagtgaaaaagcgcggatcacgttgtggcggaatgaaaaacgcattggcagcctgcagcctgaaaggcgcttctatgccgcgcgtcgtcaacagatgatggagccggggattcactggaacctgctacatgactggtacgcggtgatgggcgaaaaaaccggaccggatcgttacgccatgcgcttatacgtgcagaccggcgtgcgctggatctggggtgggggattgttgatggtgtgtggagcgctgctgagcggatggcgggggaggaagcatcctgagttattgcctgatggcgctgcgcttatcaggcctacgagtgaaaagcatggtaggccggataaggcgttcacgccgccatccggcaaaacgatgttacttttggctttactgatttttctgccttttgccacccatgcccaggtggtggacacatggacgtttgccaacccgcagcagcaggagaaagcgctgtctattgccagtcagctgcgctgtccgcagtgtcagaaccagaacttgctggaatccaatgcgcccgtggcggtcagtatgcgccatcaggtttacagcatggttgccgaaggtaaaagcgaagcggaaatcaccgcctggatgaccgaccgctatggtgatttcgtgcgctacaacccgccgctgaatgagcaaacgctgctgttgtgggcgctgccgtacctgctgttattgctggtgggcgtggtggcctggcgggtgagaaagcgtcagcacgcaggagagggggaacaatgagccagtctgaacactccactgcgccgttacgtcccatgcctgtaaagcgtctggcggctgcggcggtgttgatggtggctgcctgtgtcggcggctatctgttgacgccgaaatggcaggctgtgcgtagcgagcaacagcgtctggccgatccgctacgtgactttacgaacccgcaaacgccagaggcgcagctttccaggctgcaagaaaaaatccgcgccaatccgcaggatagcgagcaatgggcgcggctgggcgagtattatctctatcgcaatgcgtatgacaatgcgctgctggcatatcgtcaggcgttgcgtctgcgaggcgataacgcgcagcttttcgccgcgctggcaacggtgctgtattaccaggccgggcaacatatgacgcctgcgacgcgtgaaatgattaataaagcgttagcgctggatgcgacagaagtgaccgcgcagatgctgctggcggcggatgcgtttatgcaggcggattatgcgcaagccgtgtcgctgtggcaaaccttactggatgccaactcgccgcgagtgaaccgcgcgcagctggtagaggccattaatttggctaaattgttacaaaatcggcagaaataattttttcttttttgtgacttttgtcatgtgtgctgtttaaaaaaacggcgaatgagacacaagtaaaaattaattacctcagtgtattattcatttttgacgaagtaaaaaactttccataacaaatagttattcatcattaacgccataaactcgcgttattatgcataaaaacagccaaaagccctgttatgaaagggttgcgcaagacgctatgcaaatgatactgattatgcgcgttaaaaaactctacaaaccaacgcaacacaaatcataccctttcagtatgtattgctctcatgctttcggcggagagcaacgcttcatcgaggaagtctgttgttatgaaaaatttgaaagtcagcctggcctggcaaattttgctggctatggtgctgggcattctgttgggcagctatctgcattatcacagtgacagtcgtgaatggctgattgccaacctgctgtcgcctgctggcgatatctttatccatctgattaaaatgatcgtcgtgccgatcgtgatctcgactctgattgtcggcatcgccggcgttggcgatgcaaaacagctaggccgtatcggcgccaaaaccattctctattttgaactgatcactacggtggcgattatcctcggcattacgctggcgaatgtctttcagccaggctcaggcattgatatgtcgcaactggcgaccgtcgatatttcgaaataccagaacaccacggcggaagtacaaagtcatgcgcatgggctgatggggacgatactgtcgctggtgccgaccaatatcatcgcatcgatggccaaaggggatatgctgccaattatctttttctcggtcctgtttgggctggggttgtcgtccctgccggcaacgcaccgcgaaccgctggtgacggtatttcgttccatctctgaaaccatgtttaaagtcacccatatggtaatgcgctatgcgccagtgggcgtttttgcgctgatcgccgtcacggtggcgaattttggtttcgcgtcgctgtggccgctggcgaaactggtgctgctggtacactttgctattatcttctttgcgcttgtagtgctgggcatcgtggcgcgcctgtgcgggttaagtatctggattctgattcgcattctgaaagatgaattgattctggcgtactcgaccgccagctccgagagcgtactgccgcgcattatcgagaagatggaagcttacggcgcgccagcctctatcaccagtttcgtggtaccgaccggttactcatttaacctcgacggctccacgttataccagagcatcgccgccatttttatcgcgcagctatacggtatcgacctgtcgttgtggcaggaaattgtactggtgctgacgctgatggtgacgtcgaaagggattgccggcgtgcctggcgtttccttcgtggtgttactggcgacgctgggaagcgtgggcattccgctggaagggctggcgtttatcgctggtgtcgaccgtatcctcgacatggcgcgtactgcgctaaatgtggtggggaatgcgctggcggtgctggtgatcgccaagtgggaacacaagtttgaccgcaaaaaagcgctggcctacgagcgcgacgtgctgggcaaatttgataagaccgcccaataacggattgccggatggcgctttgcttatccggcctacagcgaaagagaatgtaggccggataaggcgttcacgctgccacccggcaacctactccgggttgcctgatggcgctacgcttatcaggcctacaacgactacgttcatcaggcaataaacatcagccattcgttagcgtttcgaactcttcgcaaccggtatcaaacccttccagacagcttagattcaaccagtgcaacgccttctgcttattcttttcaataaagcccggttcaccgtttaaaaacatcattcccgcccagtattctgaatagccggtacgggaaatggcggaactgcgtttgaaataccaggcggctttttcatcatcggcggcaatgcccacgccgttggcgtaaatcaggccaagcaacatttgcgcatccaccgcggagtcgttatccagatcttcagaggccttttgcagcagcgagatggcttttgggtagtccgggcgcccggcctgggtgttgaccaggatccgcgccagcgtaatttctcccgctttactgcccgcgttagccgccttttcagccagctttttcgcgtcgggataatccaggcttaccggattagtgattttgatttgcgccagtagcgcgcaggcgtcggcgtcgccactgtcggcggctttttgcgcccagtattcagctttgttcaaatcgccatagctcaaccaactgtcggccagaaaatattgtgcgcgtctgtcacctgcctctgctgcctgcaaatactggctacccggctcaggatctgcggcatgggcaaagaatgtcataaacaacatcaatgcaagaagtagtttcattttgagttttatttagggtacggaaaagacagtataaagagatcgtatggataaaaaaacagcctccgggcggaggctgttatagggaaaatgcctgatggcgatgctaatgcatctaatcaggcctacagtagacgcaggccgaataaagcattctgatgccgccatccggcagatcaacccattgcgctttcgcgcaggcgggttttcagcttgttgtactcatcaatcacatactgctcggcggctcgctgatcggcgatcggctcaacgcgtacggcgcagtatttgtactccggcgttttggtaatcgggctgaggttttcagtcaccagctcgttacaggcgccaatccaccactggtaggtcatgtaaatcgcccctttgttcgggcgatcgctgacctgcgcgcgggtgatgattttacctttgcgcgaatgaacccacaccagcgcttcatcttcaatgcccagacgcgcggcgtcggcggtattgatttgcgcatagcccggttcatcggccagcgcggccagcgccgcacagttaccggtcattgagcggcaggagtagtggccgacttcgcgcaccgtcgacagtaccatcgggtactcttcggtgagtttatcgataggcgctacccagtcgcaggtgaagaactgcgccagaccgttgggggtatcgaacttctctttaaagaggtacgaggttccctgatcggcatctgacgtgtcgcggcacggccactggatataccccagctcgcccattttctcgtaagtggcgccgtagaaatccgggcacagatgacgcaactcatcccagatctcctgggtgttgttgtagtgcatcggatagcccatccgggtggcgatttcactgataatctgccagtcggttttcaggtcccacttcggctcaacggctttaaagaagcgctggaagccacggtcagccgcagagaagacgccttcatgctcgccccatgaggtagagggtaaaatcacatccgccgccgacgcggttttggtcatgaagatatcctgcacgatgaccagttctagatcctcaaacgctttacgtactgcagagagttccgcatcggtttgcagcggatcttcacccataatgtacgccgcgcgcacttcgccatgcgccgcacggtgcggcagctcgctgatgcgatagccggtatgcgcaggcagactttctacgccccaggctttagcgaacttctcgcggttttccgggaacttaacgtactggtagcccggataagtatccggcagcgcgcccatatcgcacgcgccctgaacgttgttctggccgcgaaccgggttaacgcccgcgcttggcttgccgaggttgccggtcagcatcgcgaggctggtcagtgaacgcacggtttccacaccctgatagaactgggtgacgcccataccccacaagatcgctgcgcttttcgcgctggcatacatccgcgccgcctgacgaatttcctgtgcgctcacgccagtgatctcttcggcggactccggcgtatagccttcgacaatcttactgtattcttcaaaaccttcggtacggctggcgacaaacgctttgtcgtacaggttttcttcaataatgacatgccccatggcgttgagcagcgcgatattcgagccgtttttcaacgcgatatgcatgtcagcaatgcgcgcggtttcaattttgcgcggatcgcagacgataattttcgccccgttgcgtttagcgttaatcacatgattcgccacgatagggtgggaatccgccgggttatacccgaagacgaacactaaatcagtgttatcaatttcattgatagcattactcattgcgccgttaccgaccgattggtgcagacctgcaaccgatgggccgtgtcagacgcgagcgcagcagtcaacgttattggtaccaataacggcgcgtgcgaatttttgcattacatagttggtttcatttccggtaccgcgagaggagccggttgtctggattgcatccggaccgtacttcgctttgatggcgctcaaacgttcagcgacgtaattgagcgcttcatcccaggaaacagattccagtttgccgccacgctggcgacggatcattggggttttcaggcgcggggtcaggatctgggtatcattaataaaatcccagccgtagtagcccttcagacacagggtaccctggttggttttcccctgcgccgcctcagcccggacgattttgccgttatcgaccaccagattgattttgcaacctgatgcgcaatacgggcaaaccgtgacgacttttttcatcggtttcgctccagttaatcaaatcgcgcatacgcgctgtcgccctcagtatgcatgttttatgccacttttttagtatgggctttccctgatattacgggcgaattttgctcaaaaccctgacgaaaaacaggctatcgtcagttttgacgtgtcgaaagaaaatgccgcatgacatttattatggggagaaacgcggagcgcaggccagataaggcggagccgctatccggcaatctgctctgcctgaagtggaaattatccggatggatagactcaaggccagggaacgctttgagactaacgccaggatagaacaggccgcggcaggcagttccataccgcggcccggcttcagaggaggctgaaaaggattatcgcggcaaaaatagcagcaataacgagatatttcagcgcgtaatagagagtgcggtttttctttttcagacgttgcccggcatcgcgtgctgcgtgaacgtatttaaagatgcgattaatcgcaccggtgcgatcgttctcgtcgtttggcgaactggcggcggacatcaacgatgcgccgacccagtggtttacgctctgcgcccagcgccatttcattgggcgctcaatatcgcaaaagaggataatacgcgtctgctcagttttattttccgcccaatgaacgtaggtttcgtcgaagatgacggctttgccgtcgcgccagctatggcgctgtcgatcaacttcaataaaacagcggtcgtcattcggtgtgcttaatccaagatggtaacgtactgaaccggcataggggtcgcgatgttttcccagataggccccgggaggcaactcggcgaacatcgccgctttaatagaggggatgctgttgaccagctttgtcgttatcgggcataacgtttccgccgacgggtgggcatcggaataccatttaaggtaaaaccgtttccagccgcgcttgaaaaaggtattgaatccggcgtcgttattggcctgcgcggcttttatgtgatgctgaagctgtagtgcctcttcacgaatcacctgccagttttccgtcagcttctgcagctctggaaatgccgtggtatcaaagtacggctgctttgccggtaacgttgagaagcgagtcatgaacatattgatcggcgccataaacgtcgagtggtcaaagagctgacgggaaagtttttgtttttccaccccgcgtgaatgcgcataaatgacgctgataataaaaataccgataatgattgctgcgaacataacgtcactgtccttctaagaaaacctcatcccgggattttcaggcaaccctcccggtgatgccaaagagaaaagtgtagttcgttgacaataaatttacatttctacaacttaaaagggccatttttgctaaagaagcgagtcagcccgtttaacctttatccaggcttgtcgacagtagaattgagatgactccgctacttcacccggtgatggctgattacgttatgccttatctcccgatgacggctgccagatcacaatgctttcgtaaaccgaaaatgactttgcttgtaaccttcgcgaagataaaaacggtgtgcatcgcggcgtttaatatttgtggaaagctccgttagctcggcgcccgcctgacgtgcttcttcttctgcccaggccagaagctgactgccaattttttgtccccgcatcggcggtaataccaccagctcctgaatttcgccaatccagttggcatgatggagatgaaactgcatatgcaggctgatcatgccgaccacctctccgttgcgcagcgctaaacgataatgaacgttggggtccagtaaattagcggcgaatccatccctgaaagcctgataatcaagctcatttttaagtaactcacagataagcgcgtaaacagaatcggtatcctctgttgtcgcgtggcgtaattcacagactggcataacgtcctcccgacgcctcatcaggatcaaccatctttcgccagactgtagcaaactaccgtcattatttattctatgacagttaaacggcggataacgtgcagccaaagatcactctgatggcaagggggagggcgagcctcccggggagttaggtggcaggctgatgtttaaccacgttaatcatccacggcacaccgaaacgatcgctgaccttgccgaaaccctgcgcccagaaggtctcctgccagtccatttcgatttgcccttgtgcggcaaggttatcaaaccagcgcttcccttctgctacatcctgggtatcaagcaccagcgtaaagccggaataatgcgcccttcccgacgcgctggcatcactcatcatgatatcgctgccggcaatgcgcatgttggcgtgggcgatagctgtatcgggaaagcgcattcctgacgggcaaccctcttcgttatccgccgccgaggggggcatttcaccgaagctgagtttataaagcagttctgcgcctaacgtttgttgataatacgcgatggcgtcggcacagttgccggcaaaagagagatagggacttaacggcatgatggttacctcaggtaagagatgctcgttaagtgtagttcgaaattggcacaatattgtcggtggcagggccgctcaggcccggtaagcaaggcgctaccgggcaatgacacggtaaatcagttctttttcacgaactcggatttcagtttcatcgggccaaaaccatcgattttgcagtcgatgttatggtcgccttcaaccagacgaatgttcttcactttggtgccgattttcagcatggaagagctaccttttactttcagatctttcacgatggtgacgctatcgccgtccgccagcaggttgccgttggcgtctttgacaatcagctcatcgctctcctgagcgggttccgcatcgttccattcgtgagcgcattccgggcagatgaacatgccgttatcttcgtaggtatattcggagttacattgcgggcagtggggtaatgacatgttggtatcctcaaaaagtcagcgggggcaaacgcgcccaaaaatggcagatcgccgaaaaaggccgcaattatacacaaaatccttagcgttgtcgggactattgccgcttttataaaagggtctgcgccacgccagtcagcaatggtttacactcgaataaccgcttttttactgtcaccacagcgcattagggcgtccttatttacaccttttgaccgaattgacatatatgtgtgaagttgatcacatatttaaaccctgttagggtaaaaaggtcattaactgcccattcaggcgtcaacaggttcggttgtacagtccgtaaccggacagtgtaagtaaacctgctacgcttgtatgagggatagcgttcgcgcccctccctccgctcgacggcgacgctggcgcggtatgccagtgcccgccgtatatagcgctacagggcttagcctatgaggacagctatgctgaaaaggaaaaaaataaaaccgattacactgggcgatgtgaccatcattgatgatggtaaacttcgcaaagcgattaccgccgcctcgctgggcaacgcgatggagtggtttgattttggtgtttatggatttgttgcctacgcgttgggtaaagtctttttccccggcgccgatcccagcgtccagatgattgccgcgctggccacgttttccgttcccttcctgattcgtccgctcggcgggttattctttggtatgctcggcgataaatacgggcgccagaagatcctggcgatcacgattgtgattatgtcgatcagtaccttctgtatcgggttaatcccctcttacgcgacgatcggtatctgggcgccaatactgttgttgctgtgtaaaatggcgcagggcttctcggttggcggggaatataccggcgcgtcgatctttgtcgcggaatattcgccggatcgtaaacgcggatttatgggaagctggctggattttggttctatcgccggattcgtgctgggcgcgggcgtggtggtcttgatctcgacgattgtcggcgaggagaatttccttgagtggggctggcgtattccgttctttatcgccctgccattggggattattggtctctacttacgccatgcgctggaggagacgccagcgtttcagcagcacgtggataaactggagcagggcgaccgcgaagggttgcaggatgggccgaaagtctcctttaaagagattgccaccaaacactggcgtagcctgttgtcatgtatcggtctggtgattgccaccaacgtgacctactacatgctgctcacctacatgccgagctacctgtcgcataacctgcactattctgaagatcacggcgtgttgattatcatcgccattatgatcgggatgctgtttgtgcagccggtgatggggctgctgagcgaccgtttcggtcgacgtccatttgtgattatgggcagcattgcgctgttcgcgctggcgatcccggccttcatcctgattaacagtaacgttattggcctgatttttgcaggtttgttgatgctggcggtgattctgaactgctttaccggggtgatggcctcgacattgccggcgatgtttccgacgcatattcgttatagcgcgctggcggcggcttttaatatctctgtattgattgccggtctgacgccaacgctggcggcctggctggtggaaagctcgcaggatctgatgatgccggcgtattatttgatggtcatcgcggtgataggcttgattaccggtatttccatgaaagagacggccaatcgtccgttaaaaggcgcaacgccagcggcgtcggacatccaggaagcgaaggaaattctgggcgagcattacgataatattgagcagaaaatcgacgacatcgatcaggaaattgcggagctgcaggtcaaacgttcgcgtctggtacagcaacatccgcgtatcgatgaataaatttcgcgcttaaggttcgcttaatctctcgcgggcatactctcctccatacctttggaggagagcgtcatgaaaagctatatttataaaagtttgacgaccctgtgtagtgtgctgattgtcagcagttttatctatgtgtgggtcacgacgtattaaacgcctgttatgcctttttcaacagcacccaggcacgggtgcctgttctttccgtacggttttgcaggaaaaactgtccctgatgtagttgggtgatgcggctgacgatactcagccccaggccaattccgccataacggctgtccatccgcacgaacgcttcgcttagcttcccgcatttgctttcatcaatacccggcccctcgtcttcgaccgccataatagcgtcggggtcggcgctaatgtggatagtgatatgggttccttcagggctatagcgatgcgcgttttccaccagatttcgcaacagcatacgcagtaacgtcgcatcaccgcgcaccaccacgtccgccgcgctttccggcagcaacagagtttgctggcgcgtttccagcatggtgttcagctcatcgtaggaggggaggatcacatcttccagcagttttacttcctgataattcccggaagagaatgactggcccacgcgcgccagttgcagaagctgggagacgctatccatcatctggtcaagacgggcgataagcggcgcgacatcaacattgtgggtttttgacaataattccaggtgcaaacgcacccccgacagcggcgtgcgtagctcatgggccacatcggcggtaaaaaggcgttcattgtcgagcgtggtggtcaaacgcgtaaccagttgattgatcgccgagacgacggactcaatctcaagcgtggagctgtgaatggcgatcggcgccagattatccgccgtccgcgcttccagctctttttgcagttcggcgagcggacgggtaatacgccgtaccgcctggtaacaaattagcagcgtcaggctaaccataaatacgccggggacgatcaggctggcgaccgcctcgcgaatttcgtgcatgatatggcgatcgttgttgcgattatcccgcagcgcctgctcgaacaattggatttgctcagtgctttcatgccataaccagaaggtactgattaactggaacaccagcagaataagaccaattgtcagcattaaacgctggcgaagggtcatcgctcttcgctgaaaacgcatcaggctcacttagctttcctcagtggcaaccagcatgtagccaaacccgcgaaccgtgcgaatgcgcgacttgccgactttgtcgcgcaaattatgtatatgcacttccagagtgttggtcgagggttcgttatcccagttgtagatatcgttataaagaatttcccggtgcaccggactgcctgccttgagcatcaaccgtgagagcaacgcgtactccttaggcgtcagggtcagttcctgtccatccctccatgcctgatggcggcctatattgagcgtcagattgccaaccgtcagttcactttcaccctggttattatggcggcgcagcagcgcgcggatgcgggcgtgcagctcctccagggcgaagggtttaaccagataatcatctgcgccgacatccagcccggtaatgcggtcattgagcgtatcgcgggcggtcagaatgagtaccggcagggtatattttttctgtcggattcgcgtcaggaaatgcaggccatcctcatcgggcagccctaaatccagcaccatcagactgtaatgaccagactccagactatgctcggcggcacgcgctgtcgaaacgccatcacacgcatagccttcggtttgcgcggcgagtattaacccctgtaataatagcgtgtcgtcttcaacaatcagtatcttcattcgcttagtctcctgcacggttgcagaatatcatctgcggcctggtaatacgtcgtttgtacgccggttaatcccagcatggttgagaaaagattgtcctgtgaataatccagcgtgctcgcccgtttttgcaggcaggcctgatccacctgataacgctgttgataatctttagaaagccaaatgagcatcgggacatgtttttgcgtatccggcgcaatggaatacggcaaaccgtgtaaataaacgccattttcacccaatgattcgccgtgatcggaaagatagaccaggctggtggtgaatttatcctgatgagatttcagcaggttaatggctttatctacaatatagtccacgtacagcacggtattatcataggtgttgatcaactgctcttgggaacagttctgaatttcgttagtgtcacaggttggggtaaattttttaaactgcggtggataacggttgtaataggttgggccgtggctgccgatggtatgtaatacaataacgccatcgcctttcaaatggtcgatatagtcttccagaccgtgaaataacacttcatcgtagcactcgccgtcgatacattgtccgggcaggtttagctcggtgacattttgatgcggaacgcgatcgcatgcgcctttacagccgccgtcattatcattccacagtacgttaatccccgcgcgctggataatatccagcagcccttcctggtgatgcgccagctcttcgtcataatgtttgcgcggcatatcagaaaacatgcagggaacggagatcgcggtcgccgtaccgcaagaggtggtatgcgggaagtagatcacatcgtctttcgccagccgcggattggtgtcgcgcggatagccgccaagagagaaatcatcgccgcgcgaggtttcgccaacgatgagaatcgtcaggtttttgcgatcgcctttcagcattaatggattgcgatgggcatcctcgccaatgcgtaccagcggcaaattcgccagccgttgatgtgaataccatgaccaactggcgacaatactgttcgatgggcttaatgctttgatcaactgtttattatttcgaaataacgaggcgtaatctttatagaaaaaggcggcgaccagaataactaataaaatagagatcaggacgctggccaggcggtaaagcccgctacgtaagcgcggcgtcgccggacggattttgacccagaaggcaatcacggctgccagaacgccgcttaatcccagcgtcagcaccatttgcggcgtcatcagcgcaaaggtttccgcgggcgtggtatccatcatattggcgatcatggagcgatcgatgatgatgccgtaagtcaaaataaaatactgcgcggcagcgccgaccagaataaaaacgcaggccagcagtcggtttagccaaataaatgaggccagcgtcagcacactattgaccacgctaaacgcgacgaccggcatggaaataaacaccagcacattgcgcagcgagtttaacggtaggtcttgtagtacctgcttgtagaacgcaatgttcaggcagacggcaatataaaaggaaaaaagcagaagccaggcgatttgcccaagaacaggtcttttaagaaagcgctttaacatgttgatgcgtccatcgattcggtgacgctaatcgtgacaaagtaaaattaagtgaaccttaagaacttaatgttggtggcggccggataacctgcgctatccggcctgttgcgataacattaactacacgtggtcaatcctgtttaaccggcgcatccagcggatacgggtttttgtgaatgcggttgtagttcaacgcatacagcgcggtgatcaccatcaacgtgacgaacgaccacatcacttctttggcgccggaaccgatgaccgcccagatgcaatacacaaacgcgacgaaggtaatcagcagatacagcgggcgcgctttaccaaagtgaccgtggcccaacagtaacagcgcggcacaggtgtaaagataaggcaccagggtgaagataaccgacacggaggagaccagaccaaactctttcgcggcgttcggcgacatactgctgaactggaagatagtcatcagcacgccgacgataagcaacccagccactggcgtaccggctttattaacccgtgcgaagattggcgggaagagaccatcgtccgccgccgcttttgcggtttgaccggcaagcagcgtccagccgccgagagagcccaggcaacctgctgccgcacagaaggaaacaatagcccctgcggtatcgcccagcgccatacgcgccgcgtcaccgaaaggcgatgccgacacgcgcagcgccgcgttggggatcatccccataatcgccgttgtggagagcacatagcagacggcggcgatcagtaccccgccgatggtggcgataggcacattgcgtttcgggtttttgaccacaccggccgcaacggaggcactttctaccccgatgaatgaccacagcgtaacgttcaacgtgctttgaatcgcgccgaaggtattcatgccgctcacgttccaggccgccatataggtttcgcctttaaaccagaaccagccgaagaccgcaatccctacgataggcaccagcgccagtacggtggcgacggcctgtacgcgggtaatcattttcggcccgacgatgttcagcagcacaaaaatccacagcaccgcgacgcaggtaagcgttaataccagtggatctttcagaattgggaagaaatagctcagatagccgacgccgataacgaccatcgcgatattaccgatccagcatgccagccagtacagcacgttcgtttgatagcccaaaaacggcccgaagcagcggcgtgcgtaggcataggaaccgccgggactgggatctaaggacgacattttggcataaaccatcgacagcgccagggcgccgatgatagtgaccagccatccgtagattgcaatcccgccagtggccgccaggttagcagggagtaagaatacccctgaacccataatattccccgataccattaaggtgacggggattaggcccactttgtgagcatcagcatccgaagacataatttggactcctgaaaaggtgacttcgttacgataaattacgtcgtatcataccccctcagaatgccgctgaattatgtcggagacgggttatcgccaatgctgctattatcgtgtcttatcgttgagtgtagaaaaattaggcagccgatcgttcccgatgttggctaacataatgcaggggggtcataccataaaactctttaaacacggaaataaagtacgatgtgctgttatacccacacagctgtgagacttgagagatattctttccgtccattaataattggtttacggcataacgcattcggcaggtcgtgattatttggctataactggtattctcgtttttgagctttttctttaacaagcttggactcaggcacaggcaactggcaacggcgctcagattccagtctttatgaatatcgctctgaatgatgtggtaaacgctgtcactgatgcggctgcgcagcatgtgcattaacaaagaaataaattttttgtggtcaagaaagcgggataaaacggtgaaaaggagcgcacgggtacgttcactaacaatttcatccggtgcttccatcgcgctgtagcgggcggcgaccctgaagatatccggcgtcagacagttggcggtcaataagggatcggcgttgcgttgccagacgggaaggtgtgagagatctttattcaggaattgtaaatagtctttaatattattgcgactcacttgtattactagcacgctatttaatgatgaaatgtcaataacgttattttcacaagccagaatggccatatgattcgcttttaagctgattggctccttaccatttactcgtaaccatgtatctttttcggttaataacactatgcaaggttcgttgctgcaaatcctcatacccgaactcctggaatatgaacataaaagaccggatctcgccaaacgggagagataacggggactgagtcaattgtgtgatgaattgaaactgcactaaaataactttcctgaataatattacaatatttgtacgatgaattagggtgtacaaaaagttgtacgcgagtggaaacttgtcatttttgtataaaaaaagcgcgggatggggcccgcgcaaaaaggtatgacagtattattgttttgcagcaatactcagggaatacatgccatcctcaaaaaaaagactctttgtgattaggctttcacgcacataacgtgatatacgccatcaataatttccgtgccttcggtttcatgctcaaagccagggaagtgatgatcccaggattgcagtgagcgtaagtaacccacctgcggactgttttcatcgccaaagttttcgccggagagcagcatcgggatgcctggcgggtaaggaataacggagttcgccgcaatgcgacccggtagattttcaatcgccaccatttcaatattgttgttcacaatcgcgttgtaggcgtcgcgcggggtaatctccgcaaccggcagggtggaataggcggcgttgagacgggcgcccgggttattttcacgtagccaggcaaacattttatcgcccaggtcatgaatacccatgttcgcgtaagtgtcaggataatcctgcaccagttccggcatcacctgcgccagcggcgtattcgcgtcgtaatgatgtttgaaggagcacagcgtgttgatcagcgttccccatttcccgcgagttacccccatagagaacaggaacataatctgaaagtcggtggtgcgggtcggcacgataccgtggcggccaagccatgctgtgaccagcgcagcaggtacgccggatgcttccagttcgccatcgtcgcccatacccggcgccaggatactgactttaatcgggtccagcatactccagttatccggcaggtctttaaagccgtgccaggtttccccggggcgcatgacccagcagttctggtcagtggctagcagttttgccggcgcgtcggcgaagtcatacgttttaccggtttgtggatcggtgacgacgtccttattccacggtttaaagaaccagtcgccttcatcggtaaactctttataaagacgcgccatcgcctgacggaaatcaaccgcttcgtcaatcacctcttgagtcagggacaggccgctgttaccgtccatcatcgataccgccacatcgttggatgcgcagatggcatataacggagaggtggtggcatgcatcatataggcctggttgaagcgggagaaattcaccgcgccacggccttcacggacgtgaatgtaggaagcttgtgaaagcgcattcagtagtttgtgcgtggagtgggtggcaaacacggtcggaccgttatggtcgcctggctcgccgcgcatcgcgtagtgatcgcaataaatcgggttgaagcgcgcatagccgtaccatgcttcgtcgaagtgaatgcgatcgctggtttttgccagcagatcctgcgcctctttggcgttatagcatacgccgtcataggtacagttggtcactacgctgtaagacggtttctgtccggctttagttttggtcagcgggctggcgctgatttttttctgcaaggtttcaggctgcatttcctgcgggtagattggcccaataatgccgtaacggttacggcttggcaccatatataccggtttggccccagtgaggatcagcccctgctcgatggatttatggcagttacgatccagtacaacgacatcattatccgtcatacaggcctgcataatagtacggttagaacctgaggtcccgacaactacggaccaggagcggtcagcaccgaatacgcgggcggcgtttttctcgctttcgccaaacgcgccggtatggtcgaggagtgaaccgagcgtggtacgctcaatccccatatcgctgcggaacaggttttcgccataataatcgtgataaaagcgaccggcaggcgttttagtgaaaccgacgccgccctggtgtcccggcgccgcccatgaatattcatgaatgtcgctgtatttcatcaacgcgttaaacagcggcggtaacagttgctggcgataccgggtcatggcggcaacggcgcgtccggcgataaagtcagcggtgtcttccagaatccaggcgaattcatcgacaagctccagcaggtcgcggtccagcgatgccgtcgctttttccctgtcgcctaacaggaaaacgggcacgttttgctgacgctcgtgaagcttaccgatcaattgcctgacgctcaggtgctcatccggttgttccatttggtagctaaacatcagacagtcaatggcttcgttcgcggacaagatggcatagccgtcatcgaaggatgtcgatttaatgacggtaacattttgttggctcaaggcatctgccagacgctcaaccgcgttgccaacccaggtgtcctgatgcagaaactcactttcaacaattaatactttcatcatcttttacccggttgtggaggccgtgcaatttacgccttgccgacccgccgtatgaatgtgacgtgggcaagtattaccccgtcaaatagggggtgtaaagtgatggaataatggtcggttattgatattattgtttaataaacaatgggttaattattgatattgagcgatttcacctgccgtttatcgacaggtgaattatttttttggctgatagtggtatccggctttagccgggcatcgtctggcgtcgttgctgacttagcttgcggtattgttgcggcgacataccgacaaatttgctaaaagtactgtaaaaacggctgctggatcggaacccggcagtcagagcgacatcgaggatcgttttgtcagtatcgctcaataaggcacgtacgtgattgatgcgcatcgccgtgatgtactgcttcatcgtcaattgcataacccgctggaatattcccatcgcgtaattagcattgagtttgacatgctccgcgacgtcgttaatggtgagcgcctgatcgtagttatcggcaataaatcccagcatctggcttacgtaaaactgcgcatggcgtgagacgctattcttgtgggtgcgtgatgttttattgagcaaaatgggttgccagccggaaaggctaaagcgtttaagcatcaggccgatttcatcgatcgccaactggcgaatttgctcattcgggctgcttgtttcctgctgccagcgcaacacttcaaaggtgctaagctgctgggtcgccagtgatttaaccaccatcccgtgcgtgacgtggttgataagatcgcgatccagcggccaggagagaaacaggtgcatcggcaaactgaaaatcgccatctggcggcagttgccggggcgggtaagctggtgtggcgtacaggcccaaaacagggtgatatgcccctgctttatctgcacgacttcattgttgattaaatactccacatcgccgtcaaacggaacattcacttctacttgcccatgccagtgactgctggccattctgtgcggcggcctcagttcaacgtccagtcgttgatattcggaatagagcgacagcgggctacgggtttgcttttcatcgccgttgcacatgtgcgggtcgggcgggaggagggatattgcttgcgtactcatcgtcactccatttcctgaattatcagaattatgcccctttagccgggaggaaaccgggaatccggacacagaatccgtcgatattgtagagcgtagcctgactatcaggccgaatactctgctttttacgccattttgtcccaaaaactcagatctcccgcgcgccagcatacgatctgagttttcgggaatgctcatcggggaagacggaggttttcaccgggaacgcgtgccaccatgaaggtgttcactactgttctggagagtcatgatgacggcacccaaaattacctttatcggcgcaggttctacgattttcgtcaaaaatatcctcggcgatgtgtttcaccgcgaggcgctaaagtcagcgcatgtcgccctgatggatattgacgaaacccggctggaagagtcgcacattgtggtacggaaactgatggactcagcgggcgcttctggccggattacctgccataccaaccagaaagcggcgctacaggatgcggatttcgtggtggtcgcctttcagattggcggctatgaaccctgcaccgtgaccgattttgaggtttgtaagcgtcatggcctggaacagacgatcgccgatacgctggggccgggcggcatcatgcgcgcgctgcggaccatcccgcatctgtggcggatttgcgaagacatgacggaagtctgtccgaaggccaccatgctcaattacgtcaacccgatggcgatgaatacctgggcgatgtatgcccgttatccgcatatcaaacaggtcggcctgtgccattcggtacagggaacggcggaagaactggcgcgcgacctgaatatcgatcccacctcgctgcgctaccgctgcgccggcattaaccacatggcgttttacctcgaactggagcgcaaaacggctgacgggacttatgtcaatctctatcctgaattgctggcggcctatgacgccggacaggcgccgaagcccaatattcacggcaatgaacgctgccagaacatcgtgcgctatgagatgttcaaaaagttgggctacttcgtcactgagtcatcagagcattttgccgagtacacgccgtggtttattaaaccgggacgcgaggatctgattgcgcgctacaaggtgccgctggatgaatatccgaaacgctgcgtagaacaactggcgaactggcataaagagctggaggagtataaaaccgccgagcgtatcgacatcaaaccgtcccgcgagtacgccagcaccattatgaacgctctgtggaccggcgagccgagcgtgatttacggcaatgtgcgtaacgaggggctgattgataacctgccgcagggaagctgcgtggaagtggcttgtctggtggatgccaacggcattcaaccgacgaaggtggggacgatcccttcccatctggcggcgatgatgcagaccaacatcaacgtgcaaacgctgttgaccgaagccatcctcacggaaaaccgcgatcgcgtgtatcacgcggcgatgatggaccctcataccgcagcggtgctgggtatcgaagaaatctatgcgttggttgacgatctgatcgccgcgcatggcgactggcttccggcctggttacgccgttaatctccagccgcgctggacggcagatccggcgtttaacctctactaacagaaggcgggcgctggtaacagcgacccggtaccctatgagcatctctctgacaacaaagctgagttacgggttcggtgcgtttggtaaggatttcgccatcggcattgtgtatatgtacctgatgtattactacaccgatgtggtgggactttcggtcggcctcgtcggcaccctctttctggtcgcgcgaatctgggatgcgataaacgatcccatcatgggctggattgtcaacgccacgcgttcgcggtgggggaaatttaagccgtggatattgatcggcaccttaaccaattcgctggtgcttttcctgctgttcagcgcccatctttttgagggaaccgcgcaggttgtatttgtctgcgtaacctacatcctgtggggcatgacgtataccattatggatatcccattttggtcgctggtaccgactattacgcttgataagcgagaacgcgaacaactggtgccgttcccgcgtttcttcgccagtctggctggcttcgtcactgccggtataacgctgccgtttgtgagctatgttggcggggcggatcgtgggttcggctttcagatgtttacgctggtactgattgcgttctttatcgcctcgactatcgtgacattacgcaacgtacatgaggtgtactcctccgacaacggtgtaacggcaggccgcccacatctgacgttaaaaacgatcgttggattgatatacaaaaacgatcagctctcttgcctgttgggaatggcgctggcgtataacattgcctccaatattatcaatggctttgcgatctactacttcacctatgtgattggcgatgccgatctttttccctattacctttcttacgccggcgcggcgaatctgctgacgctgattgtcttcccccggctggtgaaaatgttatcgcggcggatattgtgggcgggcgcctccgtgatgcccgttctgagttgcgcagggctcttcgcgatggcgttggcggatatccataatgccgctttaatcgtggcggcgggtattttcctgaatatcgggaccgcgctcttttgggtgcttcaggtgatcatggtggcggatacggtcgattatggggaatttaagctcaatattcgctgcgagagtatcgcttattccgtacagacgatggttgtgaagggcggctcggcgtttgcggcgttctttatcgctctggtgctggggctgattggctacacgccgaacgtggcgcagtctgcgcaaaccctgcaggggatgcagtttattatgattgtcctgccggtactgtttttcatgatgacgttggttctctacttccgctactaccgtttgaacggcgatatgctgcgcaagattcagatccacctgctggataaataccggaaaacgccgccattcgtcgaacagccggatagcccggcgatttctgtggtagcgaccagcgatgtaaaagcgtgagcatggtctctcgtgcaggccggataagccggataagcgtagcgccatccggcaattaaccgataacgcggcccgggagaacgccgggcctgccaggttatttcgcgcagttagcgcactgtttgctgacaatctgctggaagaaatcgttgcctttgtcatccaccaggataaaggccgggaaatcttctacttcaattttccagatagcttccatgccgagttccggatactcgacgcactccagatgcttaatgctctgctgtgccagtaccgccgccgggccgccgatactgcccaaataaaagccgccatgttttttacaggcatccgtgacctgctgactacggttgcctttcgccagcatgatcatactgccgccgtgggattgcagcagatcgacataagagtccattcggcctgcggtggtggggcctaatgagccagatggataacctgccggggtttttgccggacctgcgtaatagatgggatggtctttaatatactgcggcaggtcttcgccggattcaatacgctcttttagcttcgcgtgggcgatatcgcgacctacgataatggtgcccgtcagcgacagacgagtcgagaccgggtactgcgatagctgggcgaggatctctttcatcggacggttgagatcgactttcaccgcgtcgccttcgcccgcctgacgcagcgctggcggaatatactggcccggattgtgttccagtttttcgatccagatgccttcgcggttgattttcgctttgatgttacggtcggccgagcaggagacgcccatccccaccggacaggaagcgccgtgacgcggcaggcgaattacgcgaatatcgtgggcgaaatatttcccgccgaactgggcgccgaggccaagtttttgcgcttcttccaacagttcctgttccaggtggggatcgcggaatgcctggccgtgctcgttaccttccgccggcagcgcgtcgtaatagtgggtgctggcgagcttaacggttttcagcgtgctttccgccgaggtgccgccaatgacaaaggcgatatggtatggcggacaggccgcggtgcccagcgtgcgcattttctcaacgaggaagtttttcagcttgcctggggtgagcagcgctttggtctcctgatagagatacgttttgtttgctgaaccgccgcctttcgccacgcaaaggaacttgtactcgtcgccatcgacggcatagagatcgatttgcgctggcaggttgctgccggtattgacctctttgtacatattcagcggcgcgttctgcgagtagcgcaggttatcttcgatataggtattaaacacgcctttggagagcgcggcttcatcaccgccgcccgtccagacgcgttggccttttttacccatgataatcgccgtgccggtatcctggcaggtcggcagaatgcctttggcggcgatctcggagtttctcaggaattgcaacgccacatatttgtcgttttcgctggcttcggggtcatggagaatggcggcgacttgctgctggtgttcaggacggagcataaaagacgcatcatggaaggcctgttgagccagcaacgttaacgcctgcggctcaacgttgaggatagattctccattgaattcactgacgctgacataatcggaggtgagcagataatactctgttttgtcctctcccatcgggaaaggcgcctgatagataaactcttttttcgacatgtgcttccagcctaatagtaagaaaatgtattaagaacctcatgggccaggctctaagtcgcgcgccgcgcataaccgggcggcgcgcgcggccattacaggaatccgtacattgcggcaaagatccagccaaagacgcaggagacgctcacgccaatcaaacccggcagaatgaagctgtggttaatgacgaagcggccaatacgggttgtgccggaacggtcaaactgaatcgccgccagatcgcttgggtaggtcggcaggatatagtagccataacatgccggcgcagaggccacgatatacgccggatcgacaccgatagccagcgcgacgggaacaatcgccgccagcgccgctgcctgggagttaacaaacttggagaccagcagcagaacgatggcgtaggcccacggatactctttgaccatttcgcccagcacgccctgaatttccgacatatgcgcgccgaacatggtttccgccatccaggcgatcccgtataccgcgacaatcgcaatcataccggaacgaaaaacttcgttttttgagatagacgcaggattggttttggtcaggatgataatgagcgccccggtcagcagcataaacatctgaatgaccagcaccatcgacaacggtttgccgccgaaggttggacgtaagtcggagtccgcgcccaggagagcgaccacggcaatcgccgccaggaagatccacatcgccagccagttgcttttcggcagttttttatccagcagcgtcgcggtatcgccgtacacgtactgacggttttccggtacggaaataaatttctgaaacgcttcgtctttatccagatctttaccgcggaaccaactaaaaataccgattgccaggataccgagcagggtagacgggatggtgatcgacagcagatcgaggaactccagatgttttccgtcaaatgtcacgttgcccagcatcgctaccagagaaaccacggcgacggaaaccggactggcgatgatgcccatttgcgcgccgatagaactggccgccattggacgttccggacggatattattcttgatcgccacgtcatagataatcggcaaaatggtgtagaccacgtggcctgtcccacacagaatcgtcagggtacaggtgacgaacggcgccacaatagagacgtatttggggttgcgacgcagcagcttttcggcaatctgcagcatcacatccagcccgcctgacgcctgcaacgtcgccgacgcggcgactaccgcgataatgaccagcattacgtcaacgggcggtttgcctggctggagatggaaaacaaacaccagaatgaccagaccgataccgcccaacaacccgagcgcgatcccgccctttcgggcaccataaaacagacatattaatattatgagaagctgtatactaaataacatttttatttatcctcgcgataaacccagtcaattttgataaatggatcacagccatcttctgatttttgtgaatgagcatcaggaaatggcgaatattcaatgcgccagtggcgacgattaacgattaagctttttacagagttgctttaagtaattattttcttgcgatggtgatgttcagaggggagtaccctctggcgatgggcaggtggagtcagcgagagcagtaaattatgatttgtctgttttaaaaacaggcgtttattatttgatttttgtgtctcgccatcaggtaaatcacgagataaatcgaacagcatgtgacttatgtgatcattgtcacgccatttttttaaattattagtatggcgtgtggagacgcgtatctgctcaccaatatacgtattgtccataggcgtagcacaagctccattgctacaaacataattttatttaagtgtcaggaaaattccggacaaatcccttttttaataaaaatacacactctcggcatgggataatacttaattaacttttgttagcgttttgaaattaaaaacagcgcagagcgctgtaataatagaaaataacgttaacaggcctggggtgagtatatttgatctgacacaatttcccaggtttgttattaatgtgatagcgtttttattggcattgttataataaatgttaccaggatataacgcttcgcgtcggctttatgcggtatccttactgacaatattgtttcagtaaagagtaatgttccggctgaacgcggtagcggtaaaccggcctgccggtcacgccgtaatgaatactggtaaacaagatatggcaatttaccagccagatgagatatttacggcaggagacgcgtgagatattcacttcgttggccaactcgtcggtagaaaattcctgctcctgatgcgcatcaatccactggcataaggtgcgtagcgtttgctgcgtcagcccttttggtagccgacgaggctcctgctcgctggatgaattaccgtgaatgagcaggtcaagctcagactgttcgtaatactggcgtttttccatcgccgttttcttacgtagccaaccggtcaacgcttcttcaaagcgcgtggcctgaaaaggcttgatcagataatccaccacgccgtagtgaagcgaatctttaatggtggcggcgtcagcggcagaagaaatgacaataacgtcgcttttgcagcctgcgctgtgcaggacaggcagcagatccaatccgttttcctgctgcatatagatatccagcaggattaggtcaatgtgattttcactgttgaagataaactctttcgctttttccagcgtcgaagcggttccacaacaatgaaaaccggagatttgcgcgacatagcggcgatttaactccgcgaccatcgcatcgtcatcgacaattaatacattgatcataggctggtcctttttccatcccagggtaactgtacaaaaaattgtgtgaagatcccaggctcggactccacggaaattacgccgccaagcgcttcaacctgctgtttaaccagcgctaaaccgacgccgcgttcggcgcctttcgacgagacgcctttttcaaaaatcgcctcgatgcgctcaggttcgatacccggaccgtcatcgctcacttcgcaatgcagccagccatgacggtagtgtaacgagacgctgatttcgccgccggattcctggctcaacgcttccagcgcgttttcaatcaaattacccagcgccgtaatcagcaccgtaacctgatcttcattgttattatccggtaactggctgtcgctgcttatcaccaggctgtgcccgaaatcagaggcgcgggtaatcttactgagcaaaaagccagcgataatcggcgactttattttacccagcagcaaaccgatctcttcctgatagttattggccgtcttgataatatacgcttcaagctgcttataactcttcaggtgcaataatcccagaatcacatgtaatttgttcatgaattcgtgggatcgttcacggagcgcatccgcgtagttcaccatcccgtccaaccgctgcatcagttggcgaacttctgttttatccctgaaggtggatatcgcgccgataatttcgccattgctgcgcaccggaacggtattcaccagcagcaggcggcctttgacgatgatctcttcatcgcggcgcggcgtaccgtcacgcaacacttcgctaatgtccaccacctgcgaccaggcatgactcagggtggataatctggcgtcatcctgcgtttttcgataatcgagcagcgcctgcgccgcatggttaatcaacgtgacttcgccgctatcatccacggcgataacgccctctttgattgactgcagcatcgcctggcgttgttcaaacagggttgagatctcatagggttcgaggccaaacaggatacgtttcagcaccttgaccagcgcatacgtgcctaataaccccaccagagcgccgaacagaatggaccagataatactgccgcggctattgttgatctgctgcgtaacgtgactgagttccaggccaatcgctaccacgccgatctgccggtggtgttcatcataaaccggtgtgaaaacgcgcagcgctttggcaagaaagccgcgattaatggcaacgttttcctttccctgcagcgcgagcagaatgtcatcgcctttgaacggttggccgattcgctgcgtttctgggtgcgaataacggatgccctgcatgttggtcaccacaataaacaaaaagccattatgctggctcaccgcttcggcgagcgtctgaatgccgctttccgcaggcggttttttcagcccctcgcgaactgccggagagtccgccagcgagcgagccaccgccagcgctttatctgccagcgcgtcgcgcgtcatgctgctgatttgcgaaaaatagatcagatggaccacaacgagcaccgaaaacaaaacggcgctgaccatcagaatgacggtagtgccgagtttcatggggcgtttgcgtaacgcccggcatggcagggagtgtttcatagtggacctgagcggacgaatcgtaaggttattatccctgatgaggcgtctaattcaaaggcataggcgatgttgctccagtgttgaaaagcccgtcttgccttgcagggcgcgctacctgctcatgtcgttaattaatatcgccggataccgtgatgggtaatttattttcatcagaattacataaaataatttttcattaatttttataataacgtatgcggtatcacattttatttttactgacgttcagaatgcgtttgatcacaatcaatcagcgctaatatttaatctattatgattagttttcattacatattattaataattatggaagcaatgtgagaaataaaaaatggaaataaaaaaatggctgaacacaaccataacccgacgtgatgctattgtcgctactgcaaaagtaggggcggcggtgacgctaagccaggcgattacgctgccttttgctaccactgcccaggcgcaggataccccgataccgaaggatgccaacggcgaaaccgtcaggcacagcgcctgtctggtcaactgtggcagtcgatgcccgcttaaggttatcgtgaaaaatgatcgcattgtgcgtattgagccggaagacgcgaaagatgacgcggtattcggcgagcatcagattcgtccctgcctgcgcgggcgttccagtcgctggcgggtctatagcccggatcgcattaagtatccgatgaaaagagtgggaaaacgcggcgaaggaaaatttaaacgtatttcatgggatgaggccacggcctttattgcggcggaattaacgcgtgttagcgaaaaatatggccgggaagctatttattataattatcaatccggcgcgtattatcacacgcagggtagacccgcctggataagattactaaatctcaccggcggttatttaaattatcacaacacctattccacggcgcaaatcgccaccgccacgccttatacccacggtgattatgtcggtagccattttacgcagatcgcgcattccgatctggtggtgctatttggcctgaatctctcagaaacgcggatgtccggcggcggccaggttgaagagctgcgccgggcgctggagacctcgaaagcccgggtcattattatcgatccgcgctataccgattcggtgattaccgaacacgccgaatggctaccgattcgcccaaccacggacgccgcgctagtcgccggcatagcgcatacgctgattaccgaacagcttctcgacgaggcgctggtaaaccgctattgcgtcggctatgaccgtagcaccttgccggacacggctgcgcctaacgccagctataaagattatgttcttggcacgggcgatgacggtatcgcgaaaaccccggaatgggcggcggatatcaccggtattccggcaacgcgtattcgccaactggcgcgcgaaatcgcctcggcgcgcgcctgctatatttgccagggctgggggccgcagcgtcatgccaacggcgaacaaaccgtgcgtgctattcagacgctgccagcgttaacaggccacttcgggcggcccggcaccaacaatggcaactggccttacggtacgccgtatggcgtgccattgttgcctgtcggtaagaatccgatcacaacctctattccttgctatctgtggacggacgccattcagcatccggagaaaatgaccgcgacgacaatgggtgtgaaaggcgcggacaggctaaaaaccggaattaagctgtttttcaaccaggccggtaatactttgcttaatcagcacggcgaaacaaaccgcacccgtcaaattctcgcggatgaatcgctgtgtgaaaccattatcgtgattgaaaaccatatgacgcccagcgcgatgtatgcggatctgctgttgccggagaccagctatcttgaggcggaagacctggtggacagctcctatgcggcgggatcgcataactacatgattgcgattcagaaaaccgttaaaccgatgtgggaagtgcgcagcacgtatgacatctgcgcggatatcgccgggcatcttggactgcgcgagcaatataccgagggccgaactcaggcgcagtgggcggagatgcactatcagcagatccgtgaaaaacgtccatacctaccggagtggagcgtggcgaaagagatgggtgtgattgaccagcgtatcgctaccgagcagcagagccttgcgtttgccgatttccgcgccgacgccgaggctaatccactctccacgccgtcgggcaaaattgaaatttactcccaggcgctggcggatctggcgcaaacgtggactttgccagaaggcgagcgaattcccgcattgccggaattttgtccggcgaaagagtcgcaccttaacaaagcattgacggcgaagtatccgttgcagttaagcggcttccataccaaagggcatacccactcgacctacagcaatgtgctgatgctgcatgaggcggtgccggatgaagtctggattaacccgattgacgccagcgctcgccaattgaagtccggcgatcgggtgcatgtattcaatgaccgcggcgtggtggagcttccctgtaaagtgacccagcgcattttacccggcgtggcggcgatgccgcagggcgcgtggacgcggcttgacggcaacggcgttgatgtcggcggctgtatcaatacgctgaccagccaccacccttcgccgctggcgaaaggcaatccgcagcataccaatctggttgaaattaaacgcgcttaaggagtgatgtacgatgaaacagtatggcttttatgttgactcctcgcgctgttcaggctgtaaaacctgccaggtaagctgcaaggataataaagatctggatgtcggtccgaaactgcgccgcgtctatgaatatggcggcggaagctgggtgaaagagggggaaagctggcatcacgacacctttacctactacctctctattgcttgtaaccattgcgatgagccggtatgtgtctccggctgtccgaccggggcgatgcataaacgcaaagaagatggtctggtcgtggtggatgacagcgtatgcgtcggctgtcgttattgtgaaatgcgctgcccctacggcgcgccgcagtttgatacgcaggcgaacgtgatgcgtaagtgcgacggttgtcttgaccgactggagaacaatctgcgccctatttgtgtggattcttgcccgcagcgagcgctggatttcggccctgtcgatgaattacgggcaaaatatggcacggagaatcaaatcgcgccgctaccttcggcgtcgttcacccatcctaacctcattattaaaccgcatccgaaagcgagacccacgggcgatacggaaggcgcaatcatgaacattcgggaggtgcgccatgcatgagttaccgctggtcttttttacggtctttacccagagcgcggtcggcgcgtttattctgctgctgattggcggcgcaatggggctggtcgcgccgcggcgtaaggctatcggtctgttctcggtgatgtgcctgtttgggctgggcgtcattgtcggcaccttccacgtcgggcaaccgctgcgtgcgctgaatatgctgctgcgcgtcggacattcgccgatgagtaacgagattgtcctgtcggcggcttttgcggcgctcggcgggctgggggcgctcggtttgttgctgaaccgggcgacgccgctgtgtaacgcgttggtctggttggcggcgatagtcggagtagtcttcttatacgccgttccgcagatttaccaactgccgacggtggcgacctggcgttcatcttacaccacggcaatgatgatattgacgccgttgattggcggcggcgcgttggcggcattgtttggcgtgcgccgtctggggctactggtcagcgtgttggcgattttggtgagcttttgtctgcgcccgggctatatggcgacgctgatgagcgccgatagcgctctgaccgccgcgcagcatagctggtttaccgcccaggcgatattgctggcggcgggcgtggtcggggtggtggtctgcgcgcgcctgaaatcgagcgctgcggtgctggccatgacggctgtggtggttatcgcggcggagttggcgggtaggattgcgttttacaatctgtggacgctgccaatgtagttttttgcccggtttatgccatgtaagcctgatcagcgtagcgtcatcaggcgaaatatttcaggagctattgctatgctttcccgtgctgttttgccgcgtatcctcggcgcactgttttactactcccctgagaggccggaggtgaaagcgttgttcgattgtttgccaacgttgcctgagctttacccctggcgcgatcgtggatctattgaatcactgtgtgcgtcatggtcgctaccggatgatgatgcgcttacatggcaattttccgtattgtttgaaggccagggaaagatgcccgtcccgccctggggatcggtctatctggaaaaagataatttgctgatgggggaaaccaccgccgattatcgagcttttttacagtcgcagggcatggtattcactgaccgtgaacgcgagccggaagatcagtttggcctgatgctattggcctgtagcgatctgctggcacgaggcgacaacgtggcggccaaccggttactggaggcgcatctgctgccctggggattccgctatctggaattgctgcaacgcaataccgttagcgccttctatgcccggcttgccgtcgtagcgacctgttatctgcaggatgttcagcagcaacagggactacagcctgagaataagcggttgtttttctgaggtattggtcgggttttgatggcgtgccgtaatacttgtgccgccatcgtgcccgctgttgcgtcagcgggcacagtttactattacagctccggcgtctttttgaaaccggtcagcatcagcaccaggctctgttttgagtccgctggcgtgaagtcgtagtgatttccctgacggtcgccgccgatataccaggatatttccgttttcccttccgccagcgctttgcgcaccgctttatcgacatcaaccatgcgatactcatgtgaatggtccagatataacacggcatcggaacggtagttgatcgccggtttattgttccaggacacggtactgacgtgccagtcactgctggtcgggtaaaagaaaatttgatcggcgccgttcgcttccgttttgccgccaaaaaggcgaatacggtatttgaatagcgaagcgtccatattggcaggcaggggcgggatcttaaatttcaccagcgtgagcgtttccgggtgctgcgtgcgtccgccatttgtccagtcatcctgtacgtacaaggtatcgacgctggcatgaggcttgtcgtcttcgctgcttacccaggtattttcttccgctttactgtaggcgtaaggaaccgtagtgccgcaatccagtccctggttcatacacagatccgtcataaactgcgcgccatcttccgtccagccattcataaaatcggcatgggcggtataaagacttccccagcgctcttcccgggtttcgccatgcattaccgggtccatcgacaattccactttggacgtatccagcgaggagatctgcgggagtacccaggcgatgttcatattcaccgttgggattttgaccggatagtctgcggaacatttcccgtggtcggcatagatagcgttattgtggctatgggttggtttcaggttgacgccatcccaacagttggggaaagcgatcccgatattaaactggacggcatcgcccgctttacgcaggccgcatatttcgcctaccttgttggtgtaacctttgccgttggcacataaaaaggtgattgcggaactggggccagtaccgtgatgatcgcctgccagtaactccagcccggccgggaatggatggagcggatattgcgctacatttgtggattgataataggtcttttggtaggccggatttacgatttcaccatcaggtaatttcatggacggcgcccagtaagcggagctgtcggctttattatcacaggtggtatcgggttgcgcgcgcaacgtctggtaggtagagaccgcatcggtgtgggtgttgccaaaaaagtcatgccacatcgcctgattcgctttaccaaacatcataatcgcgtcatcgcccagcgtgtggtgatagccgcacacgacatgcgcctgaggaccggcatgggccgggaatgcgccagcggcaacgagcgtagccaggctgacggtaataaggttgagtttcatttttttgctgcccggttgaatagaagtgggagcagcaatagcagatcaaattgcggtgttacatctcattaattatcactttttgtcatttgccctgcatacaggggcgaatttgcagacgtactatttaaataattagccgaaactaccctcctcttgattatgtcaatttacaaaaagggtacgttagtgattaaaatcgggctttttgtgataaccctcactatttcattttgcctatgctaatggcgctcgccataaccgaataacgattctatcggacatcggctttatttttaagaaatgcgttacgacatcagtcgtgacgcgatctgctatggattttttatgagattactaaaacgcgttattgtggttgtactcttgggcgtgattttatttatggtcagggacgatatacgctatgtttatcaactgatcctcaaatatggtgataaaccctcggcgctggcactgagtagctataaagcggttattcagcaaaaaccagtcgcaggagttaagagtaacctttcaggtttgacctactccgccgaagacaggatgcttttcgccgttattaataatccccctgaactggtctggttaacgacagaagggcagctggtaggacggatgccgctgcagggcatccacgacccggagtctattgcatggagtgggggcaaccagttccagataggcagtgagaaagatggcgcggtctataaaacacaggtggatattcagcgcggcaccatgcagataatctccatggtgaagcttgagggctatgacaaagcaaaaaataaagggctggaaggtacggcatgggatgcgaaaaatgagagattatatgccgcaaaagaaagaaaacccattatgatcaaagaagtagagatgagcaaaaatggtatcaccagagcgttgccttctgccatcactgcgagtgtgagcgatgtctccggacttgaataccatgccccaacggattcgctgctggtgttgtcggacgagtcaaaaatgattcttgaggtcagttccgagtggcgggtgcgcgatcgattgttcctgacggcggagtggtcagggctcagagacgatatcccccagccagaagggattgccatggataatgaaaataatttgtatattgtgagtgaaccaaatctgttttataaattttcgtgtgatatacagaatgactaaaatctatttttactgtcacagtatgctaaaacagaacaaggttattaataccatgatttgacgattgtttgattcgttgattcattgttggggatatttatgttttacttacctcagtaacggattactttgtggtgtagcgtaacggtaattgtcctcctcatatttgcggcagcgtagtctgccgcttttttttataaattaactctctctgtaataattaacagacaatgaatattattctgttttttcagcaggcctccgaagagacctcgcatggtgatgtttagttatcaggcatgattttcttcatcaacacttaccgaatgccatgtcgcctcgctaagcgaaatcatttcatctacgccggaactcttgttaaccgggtttttcgtcggcgatgtgcctgtaaatgttccactggcggtatagtccgtatcgttgaccgtgaccttcacctgaatatcctgatgcgcctccacgactcccttaagggtgacggtgttatccagactgctaacagtcgatcccaacgttggttcggcggacggttgtgtatccatagtcagcttaattgttgcgtgagcttctaagcgacccgataaaggtcggtgtattgatgttagtgatattatcgcctccggcgccgatatcactattatcctccatggaacgtactggcggtgtagagtctatcgtcagccagccgatagacagcgaagaattatccatagcgtttgcggaacgatctctgaagatgatatccagagttgccttgcctaccactctaccaacattttaggaaaaattacgtaatatcgactgatatgtaaaactcattcagcatcaaatggattaattcaacatcagtagtaatatccatttttttataggctgatctcttttgtgttgaaatcgtttttatatttcgatctaataaatttgagcaacttttaacagataatcctgctgccacgtaataaataacttttttttcgctcaatgttaggtcgaattttttagcgagcaacagaatcccatctcttatattaatatgttttgctttgttcttatactgcattgtcagatatctcaattaacatattgatgacgagaggaagataaaaacgctaaaaattccgatggtgtagttttgaaatgttttttaaaaacgcatgtaaaataagaagcactatcataaccacacatataagccactcgagtaatattatattcactattgcgtagaagttttgtcgctttattcattcgcgcattaaggtaaacttcgctgaatgaggtgtgctcttgtttcaatttcctttttaatgtggaacaactcatatagagtgagtcagaaatatccttgagcgcccattttcgacttatgtcgcttataataatattatagatgttttcggccaatgtattttgcgatagttctctgaagagagcaaatgcttcaggttcatagatgaactctgaaagcagaaatcttattaaatattcctttttatcttgggataatttctggcttttatttgaagagtgtaagaggttgaatactcttgctacgcctgtttctattggcgctaacagatgttttgtcgtcggttttgttaatggggccgaaaagtctgcatgttcatacagaaaaaaattataagcattttttattgacgctgaatctaattcaattaaattataatttaactgttcatgagtctcttccatagtgatatgaatggtttgatctttagctaaaaatattaacattggccctgatgccgtaatatactccccggacgatgtcgtaattgaaattttacccgtggtgagcttgatgagtacggactgcagtaaatttaatccctgaagtgataaggatttcctctgccagttttgcgctgattgtaaacattcaatgctccccacctggacaggtgagggattaaatacttttagcatgataatttccttttattaaatgtgcgtgtaaatcaaaattattctgaaaaatatttcaaaagaaaactaatatatagctatataattatttgcgaacttaaggtatcaggtggcgatcttttcattttctatggaaaatgctattttatattgcatttctacatattatagtatcgttaaaaaactatgtcgcgtataaaaaaaagatggaaatttacaaggattggctcatgttattatcaatttatctctttaaaatttgaattaagtaataattgcctttaatcttttagagaatagctctttaatttcatggaggtagttagcatgaggtataagatctgatgttaatttgtgataaggtttatcctggatgtaaatattaacgctctcggccaggaaaggcatacaacgcggtaaatatatactgcggcgggtagacggtgtagcgatatccggaagtttgaggggaggggaagcattcaatcgtatggttggctttatgaaaaacggtgtaacacgttagtgaggttcttactgtgcgtatccgttaggtttatgctttctgattatataatgttgcgtgttttggcacggcagtattgaatcttttgctgcgtcggccccgaggaggaatcactcacagcgaatgccagcgcacagcctggtcctgaatctctaaatgagtagaaaacctttcggtttgatactccggttctattccttctaaatttatcgtaatgacatctgcgttacgcgtgttgtatgcttaatatccacagaagtacaagaggacaacactatgccagccgcaaacagtatggcgatgaaacgcgaaaccctgaacctgcgtatcaaacccgccgagcgcgatcttatcgatcgagcggcgaaagccagagggaaaaaccgcacagactttgtgctggaagctgcccgcgctgccgcagaggaagcgcttatcgaacaacgcatcattatggccgatccagaggcttatcaggagtttctcgttcgtttggatcaaacaccttcacctaatgccgcactgcgtaaaaccatgcagacccctgcgccgtgggagcaggaaaaatgatctccacccctgagccgcttcatgccggacatattcttactccgttttgctgcggtgtggattctatagataactggctggaacagcgggcgatgaaaaatcagaccactggcgcgtcccgtacctttgtgtgttgtggcagcgattcgaacgtactggcctattactcgctggcgtccagcgcggtcacgacgaatacctcccccggtcgctttcgtcgcaatatgcctgacccgattccggttgtggtattggggcgtctggcggtggataaatcgcttcatgggcagggcgtcgctcgggcgctggtacgcgacgcagggctgcgggttattcaggtggcggagactatcggcattcgtgggatgctggttcacgccctgtcggatgaagcgcgggaattttatcagcgggtggggtttgtaccgtcgccgatggatccgatgatgttgatggtgacgttgggggatttggtggagagtgtttaaactccagaacgcatcccttagcttctgatggccggaattcgctgtggatagtcagtgagccagaccggttttaccgcttcagccggacaacgacgtcatgacggtctggacggactgcaaacgggggaagggggcgttgaattcatgcgaatcggggaaaccaaaggcattctccacgcccggccgcccctacgcagttgcacttcctttcatttgctgtggccagtttgcgggaagactttcaccttcagtaattaagtttggggtgatcttctttactcaataaattatttttgtcgttcagctcctcacggacttttgccagtgacttctgaaaagccgggattgtttgcagtcttgcaaactctactgctcccacataacggccagcatcaacatcgctttgccagtgagcaccgcatatcactctgctttgcccgaactcccatccgcgtctggcgagctcctgcgcgcgttccggtctggcctcggataatactaatgccagaagtgtaccataagcagtatgcccggaagggtaagagccattttttcgcaaagtattctcatcttcaggacggcaggtggaatgattaaataagacaaaggggcgggtacgcatataatatttttttgccgaagcagtagcgtagtagccgcccattgtcagaagattctttaacatattccaggtttctggcgtatctttggggttaattttagcacccactactggcgagaatattctggctatattttccacgcttacatctgcatcctcagcagcttgtttccatcgcggggaaccctttatcgcatagcccttaaaataagcctccttatcatagcggtaagccggatcatcattacctggcggtggtggtaagtagaactgactgttcactgattcttcaggagaatgaaagggttgcactgtttctgctgatgtatatttagctacgatcagtggtagaaaaaatactaaataacgacttttcataaagactcactccggatcaggcaataataaacagatgtaatcctataatgatttattgcaatggttattcaacatacaggtaaaaaagcaggacgctgccctggcattatcgtctgtccataccggactgactgcagcggacaacagaacaataccggtacttccggctaacagcattttgtttaacttttgtccccgattattttttatctacgtgcctgactgacacgcattaggttaaaatctttccgtaataacacagtatgaataattattttaaagtatgtgctctgttaccccgataactaccatcagtcatgatgtgctgagtattaatttatgattatgaacaagagtcggaaacagtatttaagaataaagaaaccgaaaaagaaaaaatgctaaaattggcgaagggattattgttatcagtgatgaaaaagttcatggcggagatattggattcacttgtcggggttagcgaaccgtcagatggagtgatacgcgttattactggtaataatctccctgtagctaagtaagctttcctgacaggcgtgataaaagttccgcgcgataaaaaggcttgtacctggcattataagactcgcgtcctgcagaaacagggcagggaagggctcggcggttttaatcaggtatatctgttaaatcacatccttcaactggagcagcctttgttttaaccttcctctcatcgggccggaatgcttcgcctgcgttgatgtagcagaaaccggagaaatcacgccatccgatttcttgcaaatatcaggcgcaaaaaaacagacttgcgctaacaagtctgttctttaagagcctttcttttaacaacaagtaacagcgttacatcgtgtttttaccggcttgcctttgtgtccgtcagcattgcatcttgcaaatctgatcaaccggctttgaatagtggtgcggactcggagtcatattcacgattaacgtgctgtttgttattggttttgttggtatttcttacaaacagcgctcccacgaaggcccccataaaaaatcgctttatttttgtgatggttatcacgaaaaatcgtcgtttaagggtagggcttcgttatgtgtcctggtccatatataacgccagaatgagttggtttaaattttcaccaaaaagtcgcttctgaatcgacaaatagagtaatttttcaacccgtcgacttttcacccagaaatcacacaccgctcctcaccgtaccatagctgtgaacgctccaaatccacgaattccccctcatcgtcaataagctcctgaagggcgcttaatccttcttctgtttttcgggctgcaatatgcgattccagactgtcccaccacaactcggcgcaaccatcaaaatcgacgggcaatgaatttcttgtctgctgaagcgctgattgcgcggcactgttcgccaggggaactgtctggatgtacttacgaataccaagacgttctgagtgtttaaccaccagtgaggcatgttggttacgccagtaatgatcaaattcttctcgcgttaaatgggcacgccttttgacgcacatgactagttttaacatgttgctactcctgtcatttcgggagttcaaagcttacactctgacagcggtgtcagagtcaagaggacgttatgcagattggaaaactggcggcattgactggcgttagcatacggatgcttcggtactacgagagcgcaggtttgcttcatccttcgcgaaccgatacgggctatcgcagtttctcgtcagaagatgtggatattgtcagacggatacttattctaaatggtgcaggtttcacgttaccggttgtgtgtagtttgctgaactgcgtacatgcaggaacctcaccttgcgaggaactaaaagctaaagtgcgagaacaactggcacagatagaccgtcagtttgacgcgctctcggaaagccgcaatcttctcaataagtttcttaatgactagcccctgacaatttaccttctaacaccatgtgggaaatggattctactcctccgattgaacattgttcaaattcacatttgatattgaccctggcccaaagatgagcggctgatcgacgaagcgctgggcgttgcgccagagaaaatctggccttctcgttatagctagtcaggccagagatgggggctacggatttccattcccagaaaagcaaaaacccagccataggctgggttttctgaataagtggtgcccggactcggaatcgaaccaaggacacggggattttcaatcccctgctctaccgactgagctatccgggcaacggggcgcattaaaccgtaaaggggcgcggtcgtcaacggctttacacgaaaaaagtgataaaagcgcgctgactgcctgcttttcaggcaaaatgcataaaatcagtacccgtcaggtgagcgctccaccctgacggcactgtgcaaaacgcagaatatcttccgccaaccgctgagcggtatctacatcagcctgactgcggttgaccagcattcggctgagacaaccttccagcaccagctccatctgccttgcaaccatcgccggatcgtcaatttccagcgtggtcagtagctcatgggtaaaatcatgtgccgcgcgtttttgttgattagccagttggtgaataggatgggttgggtcgggataaaacgtacaggcggcaatgaacaagcaaccaggataacggttattactgacacattccgaaagcgcgctgtagcgtgccagtagcttttgttcagcagaaagcgtctcatcaagaagaagctggcgtcgccagatatctacctgctgactcagataacgtagcgcgtcatataaaatggcttctttatctggccagaaacgctgtaatgtgtcgagtgggcgatttacgcgctccgccaccatttccagcgtagtatcggctatcccttgcgtctccagtaatttcagggcttctcccagaatatcttcacgttgcacggtattctcctccgtctttgcttttgcaagtgtcgctcacggttggcgatcgtgcaaatgcgcgctaaaggtggcggcgtccataaagccggtgactcgcgattgcggctgttcctggccttgggtattaaagaacagaatggtgggcagcccgaggacttgcagatgctttaacagcgcgacatcctgcgcattgttagcggtgacgttagcctgcaagagcaccgtgtcgccgagcgcctgctggacccgcggatcgctgaaggtatacttttcaaactctttacaggccacgcaccagtcggcgtagaaatccagcataacgggtttgcctttggcctgcgccagcgcctgattgagttcatccacggtagaaatagccgtgaaattgaggtgcgctggagcttgcgcggatggcgatccgaacgcccaatcctgtagaggccgcacgctaatgagcgctgccgccagcaggataatctgtacgatacgcatccacgctcgtctggcctgaaggctggtgataaaggcccaaccaaagaaagcgacgcccagcagcgaccacagacgtaaaccccaagcctcgccaataatccgctccagtaaaaagaccggtaacgcgaggatcacgaaaccaaaagcggttttaacatgcgccatccacgggccgcttttcggtaacagacggttgccaaacacggtgaccagcattagcggcagacccatacctaatgcatacaaatacagcgtgccgccgcccagccacatgttgccgctctgagcgatataaagcagaatcgcgcttaacggcgctgtagtgcagggcgagcaaattaatccggcaatcgcccccataacaaaaacaccgccgggcgagccgccttgctgacgattactcattaatgtcagccgggtttgcagtgaggaggggagctgtagtgtgaacaggccaaacatcgacaacgcaagcagggtgaacacgatggcaaggccgattaacacataagggtgctgcagcgccgcctgaaactgtaatcccgccgcggcgacgaccagacccagtgcggtataggtcagcgccatcccttgtacatagataaaggccagcagcagtgcgcgccccgtcgacaaacgttgccttccccccaggacaataccggaaatcagcggatacatgggtaaaacgcagggcgtaaaggcgatgcctatgccgatcagcagcgcccagagcgcggaaaaaggtagctgggcggcgggttttgacgtctcactcgtctgggtgacagcaggcgtcggcgtggcgtctattgccgcggcgacttcacttagcggcaccgttttcgtttccggcggataacagaatcccgcatcggcgcacccctggtacgttaccgttaatgtcgcgccagccgccgcctggttaaccgttactggaacgtttagccgcttacggtagatttcgctttttccgtagaactcatcttcatgccagacgcctgtcgggagttggactgcggcgatatccgctttcgtcggcgtgatactgatttgtttacggtaaaggtagtaaccctcttttacctgccaggagagggtaagatcgtgttgattttgctgaaaatcaaaaacaaacgcccggtcggcagggacgaactgcgagcgacccggcgcgtcgaataatccggcgaaggcggatgtgctgcacagcagcaggatcagcgtaaagatgcgttgagccatgagaggtaatcagtatctccgtgagtaacaggtaaaaccagaagttcaggcgtttgatacgggtgatgagacttcaggcagtcgataagcgcttgctgatgtgaaacggtggtttttaagatcatttgaacttcatactcctgctccagtttgccttcccagtagtacagcgatgtcgcgccggggaggagggtggcgcaggcagccagtttttccgccagcactttggcggccagatcctgggcggtagcttcatccggggcggtacaaagcaccacaacggcctcggggatggaaatatcctgactcttaacatcaagcataaacacctcgaaagaacaaaaagacccgcaagtgaacggtcactatacaacggacgagggcaggatgttagtcaaagggcgggagaatgcggggcgtgatacgccccgcgggtgaaacacttacagcataaagctgcccagcaggaagccgaagcagacagccagaacgacgcccagggtgcctgggatgaagaacgggtggttaaagacgaatttaccgatacgggttgtaccggtgtcatccatctgtaccgctgcaaccagagtcgggtaggtcggcaaaatgaacaggccggaaacggcggcgaaggaagcgactgccgtcagcggagagacgttcagcgccagcgccatcggcatcagcgctttcgccgttgccgcctgagagtagagcagcgcggaagcaaagaagaagatgacggccagcagccacggatgaccctggatgacgctacccgcagtgtctttgatccagtcgatgttagcggatacgaaagtatcgcccagccacgccacgcccagaatacagatacaggcgctcatccctgctttaaaggtactggagttgaggatggcgtcagtttccactttacacaggatggtggtcagcgttgcgacgctcaacatgatgatcaaaatagcgttggtggtgttcatcagcggtttctcaaccaggccgaggctcggactgttaacaatcgcataaacaaccacgcagataacgcccagcaggaacagccagacggaattttttgccattggtttgatttcaatctgcttttcaccacgcagttcaatcagcccttcttccagacgcttgcggtaaatcgggtcgtccgacagtttggagttgaacagcatcgtgaccaggaaggacatcaccagcaccgccagcagcgtagaggggataaccacggacagcaggtgaatatagctaatgccatgaccttccataacagaagacatatacaccacggccgcagaaatcggcgaggcggtaatcgcaatctgcgcggataccacggcggtcgagagcggacggcaaggtttgattccctgctccttcgcgacttcagcaataaccggcagcgttgccagggaaatattcccggtaccagcaaaaatagtcaggaaataggtcacaatcggtgcgaggatagtgatgtatttcgggttcttacgcagcagtttttccgtctggtttaccaaataatccagaccgcccgcgacctgcatagcagagatcgcggcgataaccgccatgatgatggaaatgacatcgaatggaattgtccctggcttcacgccgatggcggcaagtaccagaacacccagcccacctgcgaatccaataccgatgcccccaagtctggcgcccaaaaagattgccagcaaaacaatgataagttcgacaactatcatattagccttccttgttgtttaacaagttgatattaaattgttgttatttggtaacttcttgtaagaaaaaaggcacgtcatcgtgacgtgcctctttggtactaccctgtacgattactgttcgctttcatcagtataacgtttagctttataagccgggtgcatcaagttctgtacggagaaaatatcgtccagctcggcttccgttaacaggccgcgctccagcacaacttcacgtacgctcttaccggtttcagcacagattttaccgacgatgtcgccgttgtggtggccgatgaacgggttgaggtaagtgacgataccgatggagttataaacgtacccttcgcacacttctttattcgcggtaatgccgttaacgcatttttctagcaggttgtagcacgcgttgctcagaatgtggatggattcgaacatcgcctgaccgataaccggctccataacgttcaactgcaactgaccggcttccgccgccatcgtaacggtggtgtcgttaccgatgactttaaagcatacctggtttacgacttccggtacaaccgggttcactttggctggcatgatggaagagcccgcctgcagttccggcaggttgatctcgttcaggccggcacgaggaccagaagagagcaagcgcaggtcgttacagattttggacatcttcactgccaaacgtttcagcgcgctgtgaaccataacatatgcgccacagtcagatgtcgcctcaatcagatcttcagccggaacacaggcgaaaccagtgacttcagccagttttttcaccgccagcggagagtattctttcggcgtgttcagaccagtaccgattgccgttgcgccaaggttgacttccagcagcagctcagcagtacgctcgatgcttttcacttcttctttcagcaggatgctgaacgcacggaattcttgaccaagcgtcatcggtacggcgtcctgcaactgggtacgacccattttcaggatgtcctggaattcaaccgctttacgttcgaaaccttcacgcaactggttgatggcatcgatcagtttgacgatagaggcgtaaaccgctacacggaagcctgtcggataggcgtcgttagtggattgacatttattcacgtggtcgttcgggttcaggtactgatattcacctttctgatgacccatcagttccagcccgatgttggccagcacttcgttggtattcatgttgacggaagtgcccgcgccgccctgatagacatctaccgggaactggtccatgcacttaccgttgttaaggacttcatcacatgcggcaatgatggcgttcgccacactcttaggaatggtttgcagctctttgttggccagcgccgccgctttttttaccataaccatgccacgcacaaattcagggatgtcgctgattttgttattgctaatgtagaagttttcaatcgctctcagagtgtgaacaccatagtaggcttcagctggaacttccctggtacccaacagatcttcttcgatacgaatgttgtttgacatgtgaaccttctttttcaagctgccaatgatttttactttaaaacacacaggatatatgtgatttcgaatgttttctgaccgacgattatcccctccatcggcctgataaacgagatcatatgctggttcagaattcctaccgtaatctggatcacttaaagtgtgggaatttaccccttatttattattttgtgaaataggtcaccgctttagtattactacctaaaataggtgtacaaaccacttgaaattttgctacgcaccaccatatcgaatcgatgcgaatcgcaaccccattcaaatggtcgtcgcagacggccatgacttacaggagagtcctttgcgctggataccctttttagctgtctttctctatgtttacattgagatttctatctttatccaggtcgcccatgtgcttggtgtcctgatgacgctaatcctggtgatttttacgtctgttatcggtatgtcgctggtacgtaaccagggttttaaaaactttttgctgatgcaacaaaaaatggcggccggtgagagcccggcggcagaaatgattaagagtgtatcgctgatcatcgctggcttactgctcctgttgccggggtttttcaccgattttctcggccttctccttttgttaccgccggtgcaaaaacatttgacgctgaagttgctgccgcatttacgtttttcccggatgccgggcggcgggtttagcgcgggtactggcggtggcgaaacatttgacggcgagtatcagcgtaaagatgacgatcgcgatcgtattgaacataaagacgatcgtcgggattaaaggtagagatgctggccggataagtcgcgtgaggcgttatccggccaacagatacgtcttacgccatgcgttttcgcttcggtaaaaacagccataatgctgccagcatgataatggcatataagcttttccaccccagcattaccagcaataacaggcacagtagacaacccgtcaccgccagtgcatagcagcgccctttcaatagtcgacagcccgccagcatacaaagcagatagagcataataaaaataccgttagcatagacgatcagcgcattgaggttaatcttcagggcgtagacgaccagggaactcacgcaacaacaggccagaataacgtttaacgcgtgcaagggaaggcgcccgggagagagttgagccagatagtgatcgggctgatattgcatttgcgtccatatcagacgcgcaaaactctgagcatacacattcaggctggcaaagcaggtgagataaccaataatgcaggctatccacaacgcctggataccgaagagatgaacaataataagcggtagcgatgctgttgccgctatcttgtcgctatagacgccaaaatgcagcaccacggcggtacaggtccaataaatggagccggccagcatcaggccaatgatcaatgcgcgcggaaaatcacgttcaggatttttaaattcagacgacaaatgcgtaaaagcctcaattcccacaaatccccagaacatgatcgccagggcggtacacagccgggaaaaggtgatttcgtttgcggctgggaaggtgatatctgcaggtttaatcgcgcctttccacagaatggcggcaataagcgcgataattaatccagcgataatggcttgcaggttggcgctggagctggcgccgcgcgatcccataaaccatagtaaacctagagtacccagctccccaaataagagctgttcgctttgccagccaaacagcgcctggccgaaacccaccgcaatatgcaaggctgcgggaaaactaacaggaatgactgataaaaacagccaactgatcacccgttgcagacgcgggccaaatgccatcccgacaaaatgcgctacgccgccagcgtgtggaaagtgacgccccagcacagcaaagacaatcgcaatagggaaaatcaaaataatgagcagcggccatgcccaaaggctgatgtcgcctgccgccagcgcagccagctccggaagcgcaaaaacgccagtccctaataatgatgtggttaacaagataacgccctgaaccaacccaagctctttttttagttcattcatcagctcattatccggcggcattgtaacgtcaggtgacgacagacatttttaagcgtatcacacacgccttttcttatagcaggatgttctaaaccttgggtaaacgtgagataagtagcgtttttaccgcttttttcgctcagaagaattttttttcatctccccccttgaaggggcaaaaccccatccccatctctctggtcaccagccgggaaaccgtttacgggccggcgtcacccataactgataatgactttctcaaaggagagctatcaatgagtattcgtccgttacatgatcgtgtgatcgtcaaacgtaaagaagttgagtctaaatctgctggcggcatcgtactgaccggttccgcagcgggtaaatcaactcgtggcgaaatcatcgctgtcggtaagggtcgcatcctggacaacggtactgtacagccgctggacgtgaaagttggcgacatcgttatttttaacgatggctacggtgtgaaatctgaaaagatcgacaatgaagaagtgttgatcatgtctgaaagcgacattctggcaattgttgaagcgtaatccgcgaacgacactgaacatacgaatttaagggaaagagaaaatggcagctaaagacgtaaaattcggtaacgacgctcgtgtgaaaatgctgcgcggcgtaaacgtactggcagatgcagtgaaagttaccctcggtccgaaaggccgtaacgtggttctggataaatctttcggtgcgccgactatcactaaagatggtgtttccgtagcgcgtgaaatcgaactggaagacaagtttgaaaacatgggcgcgcaaatggtgaaagaagttgcctctaaagcgaacgatgctgcaggcgacggcaccaccaccgcgaccgtactggcgcagtccatcattaccgaaggcttgaaagccgttgctgcgggcatgaacccgatggacctgaaacgtggtatcgacaaagcggttgctgcggcggttgaagagctgaaagccctgtccgtaccgtgctccgactctaaagcgattgctcaggtaggtactatctccgctaactccgacgaaaccgtaggtaaactgatcgcggaagcgatggataaagtcggtaaagaaggcgtcatcaccgttgaagacggtaccggtctgcaggacgaactggacgtggttgaaggtatgcagtttgaccgcggctacctgtctccttacttcatcaacaagccggaaactggcgcagtagagctggaaagcccgttcatcctgctggctgataagaaaatctccaacatccgcgaaatgctgccggttctggaagccgttgcaaaagcaggcaaaccgctgctgatcatcgctgaagatgttgaaggcgaagcgctggctaccctggttgttaacaccatgcgtggcatcgtgaaagtggctgctgttaaggcacctggcttcggcgatcgtcgtaaggcgatgctgcaggatatcgctaccctgaccggcggtaccgtaatctctgaagagatcggtatggagctggaaaaagcaaccctggaagacctgggtcaggcgaaacgtgttgtgatcaacaaagacaccaccaccatcatcgatggcgtgggtgaagaagctgccatccagggccgtgttgctcagatccgtcagcagattgaagaagcgacctccgactacgatcgtgaaaaactgcaggagcgcgtagcgaaactggcaggcggcgttgcggttatcaaagttggcgctgcgaccgaagttgaaatgaaagagaagaaagcccgcgttgaagatgccctgcacgcgacccgtgctgcggtagaagaaggcgtggttgctggtggtggcgttgcgctgatccgcgttgcttctaaaattgctgacctgaaaggccagaacgaagaccagaacgtgggtatcaaagttgcgctgcgcgcaatggaagctccgctgcgtcagatcgtgctgaactgcggcgaagagccgtctgttgtcgctaacaccgttaaaggcggcgacggtaactacggttacaacgcagcaactgaagaatacggcaacatgatcgatatgggtatcctggacccaaccaaagttacccgttctgcgctgcagtacgctgcttctgtggctggtctgatgatcactaccgagtgcatggtgaccgacctgccgaaaagcgatgctcctgatttaggcgctgctggcggcatgggtggtatgggtggtatgggcggcatgatgtaattgcccaccccctgcatccttcaggctgcagatgcgttggctaaccccagtcacttacttgagtaagtgactggggattaacaaactggccgccttcctgcaaccagaatgatttgggtgcttatctcccagaattgagaaacccccgggcagaaatgaccgggggtttttcttttagtcatctttttagtataagattcagatacggacaaaacgtccagctcattgattatggggaataacatgcacgtgaaatatttagcagggatcgttggcgccgcgctgctgatggcgggttgtagctccagcaacgaactcaccgctgccggccaaaatgtacgctttgtcgaagataagccgggcgcggaatgccagcttattggtacggcaactggtaaacagagtaactggttttcaggccagcacggcgaagagggtggctcaatgcgtggcgcagcgaacgatctgcgtaatcaggcagccgcgatgggtggaaacgtgctgtatggcgtaagtagtccgtcacagggcatgttgtccagttttgtcccgacggccagcgagatgaacggccaggtttataaatgtccgaactgatatgtctgaatcgtaacgccctctgaaagattcagagggcgatatggttagcgtttttcctgcgatgatgccatgcgtagattatgcaacgcgcgcatgcattgatcttgcgtcagacgcgctgctttaccggttccaagcgttctgacaaaaaccttacacggttttccttccagctttttaagacgcgggctgaaattcagcaagcggcgtgatattgcttcagcttctttagagcctgactgactacgggtcttaatgatggtgccgcaatcatgcgattgtcctgcctcatccgtataacgataaacgagcgctaaataatggttatacagattatgtttccagtcaggctggttataggtatcgaattcgatattaccgttttccaggcagtcagcatcgtataatggtaaaaagtccagcattgaagaaatacgcaatgcgagctcacgcatttcggcattattaatggcgtgaataatagccatcaccagaacttcaacctgccactcaccgacctgtaaatcaagatggctaccattgtgcagctttaacgtaaaggttaatactttttctgtattatcgctcaacgctaaagattcaacacgctgattaacatcggcgttttccagctcttcacggagtattgccggaatattctcatgcattttaagcacatgactgcttttagctttctggcgtttttcctgctcttgttccggaagcgagtgttgtagataaagccggtgttcaaggccgatcaacaagtctcgcagcgcgagcacaggaaagaaaagcagtgtttctttatttctcagtgacttcaccttaagcgccagcgcgataaacttatcattgtgacgaataacgccggtatttagtcccttaatcgttaaggccatgtcaattctccacaaatataaaataattaaatgttttactgcaatgtatttgatatataaattgtttatgccgtcctataaaaaggagaaccagtataattcgaaaatgcagtacacgctaagcgagtcctaaaacggactttattgaaaagagaggaccggaaaggtgtatttaacgaaggttagtttatcctcgccaaagggtgaggagaatcgcgggggagtctcctcgtaatattgcgcggtaatatttttcgtcgtccctgacgcgcccgcgaggattagcactgccgaagctgtaaatccagcggtgttttgctcggttcgccgccgatttcacgcgccagtcttggcaccatatagccggataccagcgtgagcagttcgcgcatgatttgccgggcttcgtcatcggtgaccataaaatgcgcggcgccctgcactttatccagcacatgcaggtaatagggcatcacgccggcgtcaaatagcgcgttgctcagattcgccagcgttcgcgcgttatcattcacgccacgcagcaggacgctctggttgagaagcgtgacgcccacgtggcgcagtttcttcatcgccaggccgaacgcctcgtccacttcattagcgtggttgatatggttcaccaacaaaatttgcagacgtgactggtcaaagcgggcgaccagttcgtcagtaatgcgtgccgggatgacgataggcaaccgactgtggatgcgtagccgcttgacgtgcttaatggcttccagttgcgtgagcagccagtccagctcatgatctttcgccatcagcggatcgccgccggaaaagatgatctcatccagttccgggtgtgcggcgatatactccagcgcgactgtccagttgcgcttattgccttgattctctgcatacgggaagtgacgacggaaacagtagcggcaatttaccgcacatccgccttttaccagcaatagcgcccggttttggtatttatgcaataatcctggcaccacgctgtgttgctcttccagcgggtcggtggagaaaccgggggcgacaataaattcatcccgggacgtcagcacttgacgtaaaagaggatcgtcagggttgcccttctccatgcgcgcaataaaagcgcgcggcacgcggagggcaaacaagcgcctggcgtcctgtcctgcccggaggttttcatcagcttcaatctgtaaaagatgcagcagttcgtcgggattggtcacaacatcggcaagttgcgctaaccaatcttctcgcaatggggtatttagggttacaatatgcgccattttgtggcttagctaccagttaacaatttcagagggccttatggcgacttactatagcaacgattttcgttccggtcttaaaatcatgttggatggcgaaccttatgcggttgaatccagtgaattcgtgaaaccgggtaaaggccaggcgtttgcccgcgttaagctgcgccgtctgctgaccggcacgcgcgttgagaaaaccttcaaatcgaccgattccgcagaaggcgcggatgtagtcgatatgaacctgacttacctgtacaacgacggtgagttctggcatttcatgaacaacgaaaccttcgagcagctgtctgcagatgccaaggctatcggcgacaacgcaaaatggctgttggatcaggcggaatgcatcgtgaccctgtggaacggtcagcctatctctgtcactccgccgaactttgttgaactggaaattgttgataccgacccaggtctgaagggcgataccgcaggtactggcggcaaaccagccacgctgtctactggcgcagtggttaaagttccgctgttcgtgcagattggcgaagtgatcaaagtcgatacccgttccggcgaatacgtatcccgcgtaaaataatttacgttatcgggaaaaatggtgcagcgtatgctgcgccatcctatttttcgcgcctcaatgatgaaacgctttatcggtcttgtcgcgctggttcttcttaccagcacattattaacggcatgtaataccgcccgcggcttcggcgaagatattcagcatctcggccacgccatctcccgtgcagccagctaatcgcttctcgtcttcctaaaattagtcgatcgcccatcattttctgggatgttgtctattattaagttgctatacacaaacaacattggctagaaaaggaagacattatggttaaaaagacaattgcagcgatcttttctgttttggtactttccactgtattaactgcttgtaataccacgcgcggcgtgggcgaggacatctcggacggtggtagtgcgatctctggcgctgcaaccagagctcagcagtaatcatcaacggtacggcatggcgtcgtaccgttaatcgattttctccggaagcataagaaagggagaataccggttatccatatgaagtttcatacggatattacgtttataggtgtaaaccgttttcccgtgaatgccaagcgcatacgcaatctctttattgctggtgccttccgtccacatcgcgagcactttttcctcctgcggagagagcaatggcgtggcgctttccggcgcttcctgcagtggatgagtatgtagcgctcctttaattcgttgtgcaagctcatgtaaaggcgtgtgtttagataacaccgcatgactggcatattgcggtctgtacggcatattccctgactgtaataataccaacggcgtcatcctgcaggcggcaaaaaatgcattgataggctgttcgggtaaggcatcgttgagaaaaccatataaatcagcgataaccaggtggggcttccattgcagaatatgttctttcgccagtataaggttattcatcccggataccagcagtgaagaactgagcacatcagtgtgattaagccaggcctccatgcccgtacgggtaaagtggcatcggtctatcactaaaattttcaacatagttttttgcacccggaagtagataaagcactttctttcccagaaggcgttccatcatagagaactcctgtgggcgctaaatgcgaaaactacgcggcttaaaagggccaattcccgcctttagacggaaaaaaataaaaaggttgaaattcattttctctcaggcaagaatggcttttcatccgtatacgttacaggacgacctgtaaacgctattctcaccggggacggccccattaattatctggagcctgctatgtcctggatcattctattaatcgctggtttacttgaagtggtatgggctgtcggcctgaagtatacccacggtttttctcgtctgacccccagtattatcaccattacggccatggttatcagtatggcgttactttcctgggcaatgaaaacgctgcctgttggaacggcgtacgccatctggaccggcatcggcgccgttggggcggcaatcaccggtatccttctgctgggcgagtctgcctcaccggcgcgtttgctcagtcttggcttgatcgtcgcgggtatcattgggctaaaactcagtgcgcattaattcgtcgctgatattgctacgaacctgattgttttacccaaattaatttattgacgtcaaacccctcccgggtcgcgacggccagcatttgctgttttatttcctcagaaagcgttggcgtgcgagagagtatccacagatagtcgcgatccgggccgcacaccagcgcatgacggtattcccggtcaagcgcaatcacgttatagctgccgtagaacgggccgaaaaaagagaccttgagcgcggcgcggtttggactaccggtaaaatacgctttgccttctgttttttgccacatttcccgatccgggttatagcctttattgatgacattaatcccgccatcgtcacgcagactataggtggccgtgacttgttccagtccacgttcaaatcgatgatcgaggcgtgcgatctcataccaggtgccgaggtaacgtttggcatcaaagttatttaccacggtaacgcctttaggcggggtaggcgaactacaggcgacaaccaaaaatgccgcagtaaccgcagcaacgacgggcagcaagcgcatagcgtttttccttccagtgttttttctaagtgtagaacctggcgggaaaatgagaggcaggaaaagaaaaaatgccctcttatcgggtagataagagggcgtcgtggcaacttagagagagataacgccaatcgccgtcacaacggtcaggattgccgccagaccgtagaagacccatttgcccgcgggcacgtggattttcaggtcatgcatcgcgtggtgcatacggtgtaggccacaccatagcggcagcacgatcatcaggaacagaaaaacgcgaccaatgaagctttgggcgaacgtcagtacgcgctcaaaactcagggcatcgcccggaaatagccccagcggcagcatgatgccaaccagtagcacgatcaccggcgcgatgatcgcgccccacataccgcctgcgccaaacagtccccagaatacgggttcatcagaacgttttgggtttggattaatcatccgggactccttaccagaacagggcaacatacagaatgactacggtgactaccgcagtgaccacccaaagccctttgatgattggctctggccccattttttcgtcttttacaatgatattggccgccttcggcgccagttcaaaccaggttttggtgtgcagcagcgcggccgccagggtgatcaggtttaagatcaccaccaccgggttttgtaaaaagccgacgaatcccatccaggattccgcgccgtgtttgagcgcaaacagaccgaaaatcagttcaatactgaaccagactgccggcaccgctgtgccttcgcgcagcatataaaagcgataaaacggcagttttttccaccaggtggacgtcatcggccgcacatagggtttgcgtttagtcgtcatgttgcactccttagcgtggtttcagggtggcgataagaaagtctttcgagctttccactttaccctgctgaatggccgcagccggatcgacatgttttggacagacttcggagcagtagcccacgaaagtacaggtccatacgccgttcggactgttcaactgcgccatacgctccttcttaccgtgatcgcggctatcttcgttatagcgatgcgccagcgtaatcgcagccggtccgataaattcaggattcagaccgaactgcgggcacgcggcgtagcacagaccacagttgatgcaaccggagaactggtgatacttcgccatttgcgccggggtctggacattcggcccctgatctggcgtgcgagagttgccaataatgtacggtttgatcgcttccaggctttcgataaagtgcgtcatatcgacaaccagatcgcgttcaatcgggaagttcgccagcgcttccaccttcataccgttggtgtaatcgcgcaggaaggttttacacgccagtttagggacgttgttgaccatcatgccgcaggagccgcagatcgccatacggcaggaccagcggtagctcaggtctggcgacaggttatctttgatgtagcccaacgcgtccagtagcgatgttgtttcatcataaggaacttcatagaaagcactgtgcggcgcggtatcggtttccgggttatagcgcaccacctcaactttcaggtttttcatctcagccattcgccttctccttcttatcggctgcttccgcttcaccgccgtaaacacgtttggctggcggcagggtggtgattttcacgtcgctgtattccagacgggtcgtgccatcagcatcgcggaaggcgagggtgtgcttgaggaagttcacatcgtcgcgctcggtacagccttcatccagacgctgatgcgcgccgcgggactctttacgcgccagcgcagagtgcgccatacattccgccacgttcagaccatgacccagttcgatggtatacagcaggtcagtgttgaacacgctggaggtatcggagatacgtacgcgcttgaaacgttcctgaagctcggccagtttatcaacggttttctgcatcagttccggggtacggtaaataccgcaaccttcttccatagacagacccatctcatcgcggatcttcgaccagttttcgttgccttcctggttcaccagatttttcagacgctgttcaatatcggcaacctgggcgtcgagcgcggcgctatttgcggcgcctgccgtagcagcgcgttccattgcttgttcgccagccagacgaccaaacaccaccagttccgccagtgagttggaaccgaggcggttcgcgccatgcaggccaacagaggagcattcgccaacggcaaacagccctttgacacggctttcacagttctggtcggtttcaatgccgcccatggtgtagtgcgcggtcggacgtactggaatcggttctttaaccggatcgacgccgacataggctttcgccagttcgcaaatgaacggcagacgttcatgcagtttcttctcgccgagatgacgcaggtcgaggtgaaccacatcgccgcgcggcgtggagatggtgttgcctttacgccattcgtgccagaaagcctgggatactttgtcacgtggccccagttccatatatttgtttttcggctcgcccagcggcgtttcggggcccatgccgtagtcttgcaggtaacgatagccatttttattgaccagaataccgccttcgccgcggcaaccttcagtcatcaggataccggaacctggcaggccggtcgggtgatactgaacgaattccatatcacgcagcggaacgccatggctcagcgccatgcccatcccgtcgccggtgacgatgccgccgttggtgttatagcggtatacgcggcctgcgccgcctgtcgccatgaccacggcgttggcacggatttgcaccagcgtgccttccatcatgttcattgccaccaggccgcgcgcatggttgtcatcaaccagaatatccagcacgaaatgttcgtcaaagcgctggatttgtgggaactgcagggaagtctggaacagggtatgcagcatatggaagccggttttatccgcggcgaaccaggtacgctcgattttcataccaccgaagcgacgcacgttaacgctaccgtccggacggcggctccacgggcagccccattgctccagctgcgtcatctcagtgggacaatggtggacaaagtaatccacgacatcctgctcacacagccagtctccgcctgctaccgtatcgtgaaaatggtagtcaaagctgtcatgatcctgggcgacagcggctgaacccccttcggcagcgacggtgtggctgcgcatcgggtacacttttgagatcagtgcgattttagcattgggattcgcctgtgcggcagcaattgcagcacgtaatcccgcgccaccggcgcctataatggcaagatcggcttgaaaggtttgcacgacattcctccagattattgtaatttcaccctcgcgcagccagataaagcctctgggttctgcgaagtatgaatgcgtttccactgctcctttatgggtacaacagtatagtctcagggatgtgagggaaatttgacgtgttcgatttttttagcgtatcagagggatgaattatcattgattttgattaatttaattactaaaccatctgaaatcactttttttaccctccagaaggcgcccgatacgcctgcgcaaaatttgtttcgcccgcgcgttgcgagtagacttcgtgaccttgtcttaaactggagaaagaatcatgagcgaaacggcaacctggcagccgagcgcgtccatccccaatttattaaaacgtgcggcgattatggcggaaatccgtcgtttctttgccgatcgtggagtgcttgaggttgagacgccctgcatgagtcaggcgacggtcacagacattcatctgttcccgttcgaaacgcgtttcgtcggacctggccattcccaggggatcaacctctatttaatgaccagtccggaataccatatgaaacgcctgctggcggcagggtgcggcccggttttccagctatgccgcagtttccgtaatgaagagatgggacgacatcataatccggaattcactatgctggagtggtatcgcccgcattacgatatgtaccgcctgatgaatgaagtggatgatttgcttcagcaagtgctggattgtcaacctgcggaaagtctctcctatcaacaggcgtttcagcgccatctggagattgacccgttatcagcagataaaacgcaactgcgtgaggcggcggcaaagcttgatttaagcaatatcgccgatacggaagaagaccgtgatacgttgctgcaactgttgttcacgatgggggttgagccgcatataggtaaagaaaagccgacctttatttatcactttccggcaagtcaggcatcgctggcacaaatcagtaccgaggatcatcgcgtcgccgagcgctttgaggtgtactacaaaggtattgagctggcgaatggtttccacgaactgacggacgcacgtgagcaacaacagcgctttgaacaggacaatcgtaagcgcgccgctcgcggtctgccgcagcagccgattgaccaaaatctactggatgcgctggccgccggtctaccggattgttccggcgtggcgctgggtgttgatcgtctggtgatgctggcgctgggagcagaaagcctggcggacgtgattgcttttacggtcgatcgggcgtaaatctgaaattcactctttcgcgagataaaatggcgcaataagcgccattttgtagcatattttttcaattatcctctgtttgccacaacataaggctggaactttgatgccatttaggtatcaatcctgtgttgatttttttatcgctgaccttcgtaaaaaagaaggcggcgtcaatcggtgagcggcgtctggcaaacgcgctcgagcgtaagggatggttgaatgacccacacgataaaaaagatgagccttattgggcttatcctgatgatttttacttctgtttttggttttgcgaatagcccgtcggcgttttatttaatggggtatagcgcaatcccatggtatatattttctgccttgctgttttttattccattcgccttaatgatggctgaaatgggttccgcttatcgcaaagaagagggcgggatctattcgtggatgaataatagcgtggggccacgttacgcgtttattggcacgtttatgtggttttcatcgtatgtcatatggatggtaagtacggcggcaaaaatttgggtaccgttttctacttttgtttttggcgccgatatgacgcagcactggcgtattgcagggcttgagcctacgcaggttgtcgggctgctcgccgtcggctggatgattctggtgacgtgtgtcgccgccagagggatcaataaaattgcgcgaattacggcggtcggaggtattgccgtaatgtgtcttaatttagttttattgttagtgagtgtcgctattttgttattaaatggtgggcattttgcacaagaaattaattttacctcgtcaccgaatccgggttatcactccggcctggcaatgttgtcatttgtggtatttgctatttttgcgtacggcggtattgaggctgtcggcggactggtggataaaaccgagaaaccggaaaagaattttgcgaaaggtattgttttcgcggctattgtgatttcaattggttattctttggcgatctttttatggggcgtcagcactaactggcaacagatattaagtaatagcgccgttaacttagggaatatcacctacattctgatgtcgagtttaggcacgacattaggtaacgcgttaaacctttctccggaagcagcgatgacggtgggcgtctggtttgcgcgtatcaccggcctttctatgtttctggcttataccggcgcgttttttacgttgagctattcaccgctgaaagccattattcaggggacgccaaaagcgttgtggcccgcgccgatgacgacactgaacgctaacggtatgccggcgaccgctatgtggctacagtgcgtgctggtgagtctgtttattttgctggtctcttttggcggtgacaccgcatcggcgttttataacaaactcacgctgatggcgaacgtctcaatgaccttgccatacctgttccttgcgctggcatttcccttctttaaagcgcgtcaggatctggagcggccatttgttctctttaaaaccaaagcctctaccctggtcgcgacgggtgttgtggtgctggtggtgacgtttgccaacgtctttaccatcatccagccagtgattgaagctggggactgggacagcgccttgtggatgatcggcggcccgatcttcttctcgctgctggcgatggcgatttatcagaattacagtagccgcatgagcgccgatccggagtgggcggcggagtaatctttgtccggatagcgttagctcatcggctttatgaaaaggatatttataatgagtccgaaaatgtttgcgttgtgcgctatctggattttactggctatcccactcatcgctgtattttcagtcctggataaagagtggatgattggcgagagtgggataaccaacatttgtgatgtgatgagaactgtcgaaaatgatgattccagaagttttggcgcgatgatgacgctgcccctgtttttcccatttttttacgttactgtgtataagaaaatacgtagttggtttttgtactgtgtcgcgttggtgatatttgcttactggtcctggcaattcttcctgcgctatcagttttgtgtgtgatctatgctaaaagacctgataagcctatgtcatcgagtcttttagcgtcatccggcgccattgcgtttacaaactccccgccgggcggctggttttacccgctgacgttaacgttctccccgtttgtttaccgccgaggctctccagacgcatctggaacggcgggaacggcatatcaataccgtgttcgcggaagccagccagaatcaattggtggatctcatggcgtaatggcatacggtgtcccatttccgcggcatagatacgcagttcgaaaatctgaataccctgctggagatccaccagaaagatttcaggcggcgggttatcaagcaccaaagaacagcgctgcgccgccgtcagcagaatttgcgtcacctcttcgctattggcatccgctggcgccgggatggttaacaccacgcgcgtaacggagtcagacagcgaccagttgataaactgttcggtgataaaggctttattcggcacgataatctctttacgatcccagtcactgatagtggtggcgcgggtattgattttggtcacgctgccggtgagatcgcgaatggtcaccgtatcgccgatacgaatcggcttttcaaacaaaataatcaggccggagataaagttagcgaaaatttcttgcaggccaaaaccaagcccaacgccgagcgcggccaccagccattgtagcttcgaccactcaatgccgatcatcgagaaaccgaccagcccgccaatcagcattaacagatatttggtgatggtcgtgatggcgtaaccggtaccaggcgttaaatcgagatgctgtaataacgccagttccagcagcgcaggcagattacgcaccaactgcgtggtgatgataaagaccagaatcgcaatgagcaccgcccccagagtaattggctccaagctttccacgccttgcaccgtagaggtgacatcccacagcgaaatattctccaggaagccgaatgccgagtggatttccgaccacagtacaattaccgatagcagggcgataagcatcagaattgagcggaccagacgcagcgactgggcgctaatagcgtcaagatcgatttcactttcatcgatgtcgaccgcgccttccaggctggaggagtgcgccggttcttcttcgccgcgcgcgcgctgcgccagcatttccgcccgacgatgtttggcgcggtcaaaagccagtcggcgtcgttggatcagcatccagcggcgaatgacatgataaataaccagcaacaggaaccagatggcgaccgaggtttccagtctcgccagtagcgcctgcgctgtggccagataacccaccgccgccgccagaatcgcgataagcggcgcgcccatcaacatattccacagcaggctgttgaccatgttgtcgccgttgccttctttatcaagatagagcggaatgcccgcttttttcagactcagcgtgaccagcgccagcgcgccgcatatcaggatgaagcaaaggcggcccaacgagccggaaaactcccgatcgttaagattatcaaacatgatcactgccataatgagcggcacgatcagcccaatgctcatcaggtagtagcgcatcgctttcgctacccggtttcgcggccagccgaaatgcgccacaaacagaccattagggcgggcaaaagcggcgcaaatcatgactacccacaacagcggtactgtcgccgtcacgccatcgccgatggcgacggccagcggatacggccaggcttcctgtagaccatagccgagcgtcgcccacaagacgggcagcggcgaggcgaccagaatcgaccagaacaccgttcgcagcgtcagcgagaagtgatcctgggtgactttcccgacgcgcgaggccgagcgttcaaggaaccggttgaagtgttgacgtgaatagaggctaaacccgaccagcgccagcgcgccgaataacggcagtagcgtctctttgctggtcagcatcatgatgctggctttacctaactgattaaacgtatctaatgagataagccgacgtaaatcctgaaccaaatcaacaggccaggagagcgatagcgggctaacgtcagcggtccagaacagataacggtgggtcgcttcattaacctctttaagcgcatcctccagttggctgttggagactttcagtttggtcagctccaggatcagcgtgtcgccgccctgtaacaacgagttgagcagctcgcgctgagtgcgaagctgggcgtcaagaatctggttttgctcggcggtcagcggctgtccattggcctgacgtatttgccgtagctgcggctgcttattgagtaactcttcatagcgcatacggtggacgcgtagctgcgccatttccgtatcaagctgctgcggcttaggcatctctggcagacgggcgacctgcgcgcgcagcgcttcgccaagcatgttggacacgccaagccattgcgactgctcccgcagcgtattgagcgcctgacgcacctgtaacgtttggctggtggcctgtcgctgctgcgaggcgaccagatccatccgctgcgcttgttgattaagcgcctgtgacagctcgcggttgactttaaattgttcgacgatgccttccggcaaaccggcgctgttttccgccagcagctcagtactttccagcgcgcgttccgcttcacgttgacgcaggctgttgagctgattgcgcagcgcctgaagatacgcatccaattgctgactctgtttttccgccagctcggaacgcagacgagccagttcctgccggttgttggcggacagttgcgccaactccagttcgtcgactaacgcttttagtttggcggactccgcctgcatactgagactttgcgcctggctaagcgcggcacttccgcctgcggcgccgagtcgtcgctcaatctcattaagctggcggcgggcgtcgttttgctgttggggaagctggctgagcgagtcggcgatctccctgacgcgctcctgctcctgttgcgcctcgcgggttttatctagtagctggctgctaacctgcaagatctcctgatttaacgcttcggtggacatctctggcggtacgctgcgaggttcatcgcgcagattattcaactgggcgcgcaaggtggcggatagcttagggaaattatcaataacgtgttgatattgtttcgcgcgctcaagcgagccttttcgctcttcaagcgcgtttaacgcagtctggagcgcctcaacggcttccggctgagcgggcttcgccgcttttgcctgctccagttcctgcgtgatttgtttggcgtcgggggccgttgcggcgaacgcccccgtgctgaggcaccaggccatcagaaaagcgataatcaggcgcacgtcagcattctctcttgattaggtgtcgtcttttttattgtcaaccagcgggctggcgtcgtgttcggctttaatttcttctgccggcagcggagcaggttctacctccggcgcgacgaatgtttcggtcgacgtcgccagcggttggccaattttggtaacggacaggcttgccagcgacgcgatcagattcacttttcccggcgcaaataagttgatgaccgtggaacccagtttaaagcgtcccatctcctggcctttcaacagggcgacagacccttcatgttcgccttctggccaggtccagcgcttgatgatgccttcgcgcggcggggtaatggtccccgcccagacggtttcgatactgccgacaatagttgcgccgaccagaatctgcgccatagggccgaactcggtatcaaacaggcagataacgcgctcgttgcgggcaaacaggttggggacgttttgcgcggtcagatggttaacggagaacagatcgcccggtacgtagatcatttcacgcaggatgccgttgcatggcatatgcacgcgatggtagtcgcgaggggagaggtaagtggtcacaaacgtgccgttgcggaacttatccgccatcaggtagttacccgccagcaacgcctcaaggctgtaattatggcctttggcctgcaaaattttatcttcttcgatacgacccaactggcttatcacgccgtcggcaggcatcaccaggatgttaggatcggtattgagcggacgcacgtcatcacgcagcggacgaacaaagaaatcattgaacgtacgatagctggcggtatccggtttttgcgcctcggtcatatcgactttgtaatactttacgaagagatcgataaccagttttgtcagccatcctgctcgtttgcttgcgccccagcccgccaggcgagtgagccatagtttcggcagaatgtattgtagcgaaagtttaaatgagtttaacaaggtagcctccaggccattgttgttcctgaaccggcagttataccggtatcctgaaaaaaggggacgattctaacgacgcctagcgtatctgtcagtcgtccgtatcagaaaagtttttacgcgtttttacctgcgccatactttcaagaattcggtgataattttcgaaacgggtttccgcaatagcgccgttctctaccgcttcgcgaatggcgcagcctggatcggcgtcatgcttgcagtcccggtatttgcaatgtcccaaatagtcatgaaattcgacaaagccctgggtgatttgttccggctccagatgccataagccgaactcgcgcacgccgggggaatcaatgacatcgccgccatgcgggaaatgatacagacgagcagcggtagtggtatgttgacccagaccggagacattcgacacatcgttcgtcagaatctcgttctgtaagccgagcagagcgtttagcagactggattttccgacgccggactgcccagcaaaaatactgatgcgaccggttaacgcctcttccagcggtttcagaccatcctgcgtatggctggagaccatcagcacgcgatagccgatattgcggtagatatccatctgctcattaacgaagtccataccttcgtcgtccagcagatcaattttattgagtacgataagcggctcaacctgtagggtttcacagccgaccagatagcgatcgatgatattcagcgacagctccggcaaaatcgcggagacgataacgatttggtcaatgttggcggcaataggcttcacgccgtcgtagaagtccgggcgcgtcaataccgaggtgcgctcatgcaccgcttcaacgatgccttttacgttgacgccctctgcggcggctttgcccggacgccagacgacgcgatcgcccgtcaccagcgaacggatagtgcggcggatattgcaacggtgaacctcgccgtcagcagactccacatcggcatgcataccaaaacggctaatgacgataccttctgcaggctcgccaaacaggttgtcatcgtagtcggctttctccgcggacgtttttaaacgacgctggtgattggcgttcacacggcgctgctggcctttggagagtttatttttgctcaatcgtactggctcctggtcgcccatagtgggcaaaacatctatgatacacgcaattgtagatgaatatagtcacagtgaatgtgacctctgaagggtggaaaatagcatgagtgccgatgaaaacaacctgatttggatcgatctggagatgacaggtctggaccccgagcgcgatcgcattattgagatagccacactggtgacggatgccagcctgaacattctggcggaagggccgacgattgcggtacatcaatccgatgcgcaactggcgttaatggatgactggaacgtgcgcacccataccggtagcggcctggtagatcgcgttaaggcaagtacgatgggcgaacgagatgctgaactggcgacgattgaatttctgaaaacgtgggtgcctgcgggtaagtcgccgatttgcggtaacagcatcggtcaggatcgtcgttttctgtttaaatatatgccggaactggaggcctacttccactatcgctatctggatgtcagtacgctcaaggaactggcgcgccgctggaagccggagattctggccggctttaccaagcagggcacgcaccaggcgatggatgatattcgcgagtcggtggcggagctggcttactaccgcgagcatttcattaagctgtgaggcgtaacatgccggatggcaacgccagagcgtctcatccggcagctctccccacactgaattactgcgtaaaccatttctcctgcatctgcgcatattccggcgacgctttcaccttgtcgagcgcggcattaatttcttgcaatagcgcgtcgttgtctttgcgtaccgcaatgcctaacccttttccgtagtagtcaggatcgctggcgcgttcatccatgatggcgtaatccggattgttttttagccacttaccaatcgcggcgacatcgccaaacacgccctcaagacggttgtttttcagatcggtaaaggcgtttagatagctgtcataggcgacaggcgtgatagcttgttgtttatcctgcaaatagcgctgatgcgttgtaccgttttccagaccgacttttttgcctttcagatcggcaaaagtgtgataagcccctttacgcgtgacgactaccgccgatagaccttcgtaatagggttggctaaaggagacctgctgctcacgtttgggcgtcatatccataccggcgatcaccgcatcaaactttttgaagcgtaggctggggatcagactatcaaagctctggttagtgaatgagcactccgcttgcatctctttgcagaccgcgttggcgacatcaatatcgaaaccaacaattttattatcggcatcgacaaactcatagggcgcataggtggcggaggtgccaaaatgtaatgttctggcggaaacggaagcggcgtgaacggagaggctggctaacagcatgacaataagtttttttttcatcttgatccctgatatcaattggatgttgtggtcaccgtgctattctttttttggcgcagggtgctattctgattctgtgcctttaggcgtggcgtgaaaagttttttgttgcatagcgcacgctttgctcgttttttgtcttgtttggtgatttaatcagcattcaaacaaaaatcgcgaaaaaatgcgttcaggggcttgcagctaaatggatttctcgtataatgcgcctcccgtaacgacgcagaaatgcgaattacgacagcaacaaatttgcgggaatagctcagttggtagagcacgaccttgccaaggtcggggtcgcgagttcgagtctcgtttcccgctccaaaatttgaaagtacttgttaagtacaaaccaccaatcgcaggatttcgaattgcgacaaggcggcaactgaacgagtcctcaggagcttactgaagtaagtgactcaggcgagtgaaggcagccaacgcagtagcggttcgaaagacgaagattatgcgggaatagctcagttggtagagcacgaccttgccaaggtcggggtcgcgagttcgagtctcgtttcccgctccaaaatttgaaagtgcttgttaagcacagaccaccaatcgcaggatttcgaattgcgacaaggcggcaactgaatgagttctcaggagcttactgaagtaagtgactcaggcgagtgaaggcagccaacgcagtagcggttcgaaagacgaagattatgcgggaatagctcagttggtagagcacgaccttgccaaggtcggggtcgcgagttcgagtctcgtttcccgctccaattcttatctacagtaaaattatccacaacgaatatcgcgttggggcacgttttgttccgctttcgtcagatccttgtaaacagacttatccacagggcggcccattactcctggaatgcaaaaaattatacctgacgcgtagaatttctataatttactgaaaaatatagaaaaaataagatttcaaaacgttagttttattgactattccttttttccctcttgaatcgcaatgtgtttttatttttatacacagcctgtgaataattcaggcatcgcgcaccagccctttttcaatcaccctgaccagacgctgttttttcggtagctgcacttcaatgatgcaggcgttgcgcttttcaatttgttgcgcaatcgcccattcgatatgctcatcgagaagtggatgctcacccttgcggctttccagcgccgtaatgacggcattactccacggcgcattccccagcgcgacggcaacattgcgcagccagcgtaaatgaccaatgcgccgaatcgcagaaccttcagtgactttcagaaactgcgcttcgctccagctaaacaactcaagcaaatctggattatgcagcgccttgcgtgggctaaaatctgcttcgtcggtcaactgagagtaacgattccacggacagataagctggcagtcatcgcagccgtaaatacggttacctatcagtgggcgaaatgcttccggaatagcgccttccagctcaatggtgagataagaaatacagcgccgcgcgtccaccgtatacggttcgacgatcgccccggtcgggcaaatggtcatacaggcgacgcatttaccgcaaccttcctcgaccggctggtcgaccggcagcggtaaatcaatcagcaattcccccaggaaaaagaatgagcccgcctcccgattaaggataagtgagtgcttacccgtccagccaagtccggctttttccgctaatgggcgttcaagaataggcgcagagtcgacaaacggtctaaaattcagcgaaccgcagtactgctggatctgctcgcccagttttttaaggcggctgcgtaatagcttgtgataatcacgccccagcgcatatcggctaacgtagcccagcgtgggatccttcaacgtactggcaaacgcggcgttggcgggcagatagttcatgcgcacgctgatgacacgtagcgtaccgggtaagagttcatgaggccgggcgcgcatcataccgtggcgcgccatccatgccatctcgccgtggtattgtttgtccagccacgcctgcagcgcaggttcggatgcgcgcagatcggtatcagtaataccgacctgctgaaagcccagctccagcccccactgcttaatattttgcgctaactgattgagatcgaggggctttgacatgatggaccataacatgaagaaaaaccctgtaagtataccacactccatttggcccgccgatgacatcaaacggctggaacgcgatgcggcggatgccttcggactcacactctatgaattgatgctgcgcgctggcgacgcggcatttcgggtagcccgtgacagttatcctgacacccgacactggctggtgttgtgtggtcatggcaacaacggcggcgatggttacgtcgtggcgcgactagcgcaagcggcgggcattagcgtaacgttgctggcgcaggagagcgacaaaccgttgcctgaagaagcggcgcaggcgcgcgatgcctggctgaatgccggcggcatcatccatgctgccgatattatctggccggaagcgacggatctgattatcgacgcgctgcttggcaccggcatagcccaggcaccgcgcgacccggtagccggtctgattgaacaggcgaacgcccatcctgcgccggttgtcgccgtcgatatcccgtcaggtctgctggcgcaaacgggcgccacgcctggcgcggtgataagcgccgcgcatacggtcacgtttatcgccctgaaaccaggcctgctgaccggcaaagcgcgtgacgttaccggcatattgcattatgacgcgttgggactggaaggctggctggcgagccagacgccgccgctccggcgttttgacgcgacgcagttggggcaatggctaacgccgcgtcgaccgacctcgcataagggcgatcatggtcgtctggcgattattggcggcgaccagggaacagcgggcgcaattcggatggctggcgaggcggcgctgcgtacgggggctgggttggtcagagttctgactcgcggtgaaaacatcgcgccgttgctgacggcccgcccggaactgatggtacatgaactcacgcctcagtcgctggaagagagcctgacctgggctgacgttgtggtgatcggcccggggcttggacagcaggaatggggcaaaaaagccttacagaaagtagaaaacgtccgtaaacctatgctgtgggatgcggatgcgttgaacctactggcaatcaatcctgataaacgtcacaatcgcgtgattacgccgcatccgggagaggcggcccgcctgttaggatgttctgtggcagaaattgaaagtgatcgcttactttcagcacagcgtctggtaaaacggtatggaggcgtggtcgtgttaaaaggcgcaggaacgattatcgccgctgaacaccaccctctggctatcattgacgctggtaatgcggggatggcgagcggcgggatgggcgatgtcctgtccggcatcatcggtgcattgctcggacagaagtttaccccgtatgatgcggcatgtgtgggatgtgtggctcacggcgcggcggcggacttactggcagcgcgttatggcgctcgcggcatgttggcgaccgatctttttactacgctgcggcgtattgttaaccctgatgtgattgacgtaaaccatgatgaatcgagtaattccgctacctgacgaacaggcgacgctagacctggggcaacgggtagccaacgcctgcgatggcgcgaccgttatttatctgtatggcgatttaggtgccggtaaaacgacgtttagccggggatttttacaggcgttaggccataacggtaatgtaaaaagccccacctatacgctggtagagccttatgcgattgataacatgatggtatatcacttcgacttataccgtcttgcggacccggaggagctggagtttatgggcattcgcgattatttcgccaacgacgccatttgtctggttgagtggccgcaacaaggtaaaggcgttctccccgacccggacgtcgaaatccatattgattaccaggcgcaggggcgtgaggctcgcgtaagcgcggtatcctcatcgggtcattcgttactggcgcgtttagccgattagctataaaggtggcgggatgatttatcgcatcaaaaatgccgtaatagcagccttaatcctgctgtgcgcgcaggcgggcgccgccagtctctctgatattcaggtgtccaacggcgagcagcaggcgcgcattacgctgagttttatcggcgagccggaatatgcttactcacaggacggtaaacggactgtggcgctggatatcaggcagaccggcgtgattcaggggctgccgcttcagtttagcggtaacaatctggtaaaaacgatccgtgctggaacgccgaaagatgcgcaatctttacggttgcttgtcgatctgacggaaaatggtaaaaccgaggcggtgaagcggcaaaacggcggcaactatacggtcattttcaccattaatgccgatgttccgccgccaccgccgcctgtcgtcgcgaaacgggttgaaagcgcgcctcgcccgacggagccggcccgtaatccgtttaaatcttctgatgatcgcctgaccggcgtaaccagcagcaataccgttacgcggcctgcggcgcgcgcgtcggcaggcgctggcgataaagtggtgattgctattgatgccggacatggaggccaggaccccggcgcgataggcccgggcggtacgcgcgagaaaaatgtcaccatcgccatcgcgcgtaagttacgcacattactgaataacgatccgatgtttaaaggcgtgctgacgcgtgacggcgactattttatttcggtgatggggcggtctgatgtggcgcgtaagcaaaacgccaactttcttgtctctattcatgcggatgccgcgccaaatcgcgacgccaccggcgcctccgtctgggtattgtccaatcgtcgcgcgaacagcgaaatggcaaactggcttgagcagcatgagaagcaatccgaactgttaggcggcgctggcgatgtgctggcgaacagtcagtcagacccttacctgagccaggcggtactggatttgcaattcggtcattcgcagcgggtagggtatgatgtggcgacgaacgtactaagccaactcgacggcgtggggtcgctgcataaacgccgcccggaacacgctagcctgggcgtgttgcgttcgccggatatcccgtccattttggtggagacgggctttatcagtaatcacggcgaagagcgattgctggcgagcgaccgctatcagcagcagattgctgacgctatataccgggggttgcgtaagtactttgcagcgcatccgatccagtctgcgccgcagggcggcccaggccagacggccagtaccaaccagcctggcgccataaccgccgcgaattaaggagatttcatgccgattcaggttctgccgccgcagcttgcgaaccaaatcgccgctggcgaagtggtggaacgccctgcgtcggttgttaaagagctggtagagaatagtctggatgcaggcgccacccgcgttgatatcgacatcgagcgtggcggcgcgaagcttattcgtattcgcgacaatggctgcggcattaaaaaagaggagctggcgctggcgctggcccgtcatgccaccagtaaaatcgcctcgcttgacgatctggaagcgattatcagtctgggatttcgcggcgaagcgctggccagtatcagttcggtctcgcgtttgacgctaacgtcgcgcacggcggagcaggcggaagcctggcaggcgtatgcggaagggcgcgatatggacgtgacggtaaaacccgccgcgcacccggtcggcaccaccctggaagttctggatctcttttacaatacgcccgcccggcgcaaattcatgcgtaccgaaaaaacggaatttaatcacatcgatgagatcatccgtcgtattgcattggcccgttttgacgtcacgcttaacctgtcgcacaacggcaaattggtacggcagtatcgcgctgtcgcaaaggacgggcaaaaagagcgccggttaggcgccatctgcggcacgccgtttctcgaacaggcactggcgatcgagtggcagcatggcgatctgaccctgcgcggctgggtcgccgatccgaatcacaccaccacggcgttaacggagatccagtactgttatgtgaatggccgcatgatgcgcgaccgcttgatcaaccatgccattcgccaggcctgtgaagataaactgggcgcggaccaacagcctgcgtttgtgctgtatctggagattgacccgcatcaggtggatgtcaatgttcatcccgccaagcacgaagtgcgttttcatcaatcccggctggtgcacgacttcatctatcaaggggtgctgagcgttctgcaacagcagacggaaacggcgctgccgctggaggagattgcgccagcgccgcggcatgtcccggaaaaccgtatcgccgccgggcgcaaccattttgctgtacccgccgagccaactgcggcgcgcgagcccgcgacaccgcgttattccggcggcgcatcgggcggtaacggcgggcgtcagtccgcaggtggttggccgcacgcgcagccaggttatcagaagcagcagggcgaggtttatcgcacgcttttacagacgccgacggcgagccccgcgccggagtcggttacgcctgcgcttgacggacatagccagagtttcggtcgcgtactgacaatagtcggcggtgactgcgcgttgctggaacacgcggggactatccagctcttgtcgctaccggttgcggagcgttggctgcgtcaggcgcagcttacaccgggtcaaagtccggtttgcgcgcagccgttgctgattccgctgcgtttaaaagtgagcgccgatgaaaaagccgcgctgcaaaaagcccaatctttgttgggagaattgggtattgaatttcagtcagatgcgcagcatgtgaccattcgggcggtgcctttacccttacgacaacaaaatttacaaatcttgattcctgaactgataggctacctggcgcaacagaccacatttgcaacggtcaatattgcacaatggatagcgcgtaatgtgcagagcgaacatccgcagtggtcgatggcgcaggccatatcgctgctggcggatgttgagcggctatgtccgcagctggtaaaagcgccgccgggtggcctgttacaacctgttgatttacattcggcgatgaacgccctgaagcatgaatgatgtaagcaaggcgagcctgcctaaggcgatatttttgatggggccgacggcctccggcaaaacggcgctggcgatagaactgcgtaaagttttgccagtagagttgataagcgttgattccgccctcatttatcggggaatggatattggcacggctaagccgaatgccgatgagctgaaagcggcgccgcatcgactgttggatatacgcgacccgtcgcaggcgtattcggcggcggattttcgccgcgacgcgttagcgcaaatggcggagatcaccgctgcggggcgtatcccgctgttagtgggcggtaccatgctgtattttaaggcattgctggaagggttatcgccgctgccttcagcagatccggaagtcagatcccggatagagcagcaagcagcggagctaggatgggaggcgttgcatcagcaacttcaggagatagatccggttgccgccgcgcgaattcatccaaatgatccgcaaagactttcccgggcactggaagtttttttcatttcgggtaaaactttaacggagctaacgcaaacgtcaggagacgcgctaccgtaccaggtgcatcagttcgctatcgccccggcgagccgtgaactgctccatcagcgcattgaactgcgttttcatcagatgttggcttcaggttttgaagcagaagtccgggcgctttttgcccgaggagatttgcatacggacttgccttccatccgttgtgtgggataccgccagatgtggtcatacattgagggcgaaatctcatatgatgaaatggtttatagaggtgtttgcgccacgagacagttggcgaagcgccagatgacctggttgcgcggttgggaaggggtgcgctggcttgacagtgagaatcccgatcgggcgcgaaaagaagtattacaggttgttggtgctatcgcagactgaatgtgtacaattgagacgtatcgtgcgcaatttttcagaatcgaaaggttcaaagtacaaataagcatataaggaaaagagaatggctaaggggcaatctttacaagatccgttcctgaacgcattgcgtcgggaacgtgttccagtttctatttatttggtgaatggtattaagctgcaaggtcaaatcgagtcctttgatcagttcgtgatcctgttgaagaacacggtcagccagatggtttataagcacgcgatttctactgttgtcccgtctcgcccggtttcccatcacagcaacaatgccggtggcggcgccagcaataactaccatcacggtagcaacgcgcaggggtctactgcgcaacaggacagcgaagagactgaataagttcacgcgctgtttatccatgtcgggggcgtcggataatcgcccccgctggttattaagagggtttacgcttgtttgaccgttatgatgccggtgagcaggcggtactggtacacatctatttttcgcaagacaaagatatggaagacctccaggagtttgaatctctggtctcttccgccggtgtcgaagcaatgcaggtgattaccggtagccgtaaagcaccgcacccgaagtactttgtaggtgaaggtaaggcagttgaaattgcggaagccgtgaaagcgactggcgcagcggtcgtattgtttgatcatgcattgagtccagcccaggagcgaaacctggagcgtttgtgcgagtgccgggttatcgatcgcaccggtcttatcttagatatttttgcccaacgtgcgcgtacccatgaaggtaagttgcaggttgagctggcgcagctacgccatctggctacgcgtctggtgcgtggctggacccaccttgaacgtcagaaaggcgggattggtttgcgcggtccgggtgaaacccagctcgaaaccgaccgtcgtttactgcgtaatcgcattgtgcagattcagtcgcgcctggagaaagttgagaagcaacgtgagcaggggcggcagtcgcgcatcaaggccgacgttccgacggtatcgctggtgggctataccaacgccggaaaatccaccctttttaatcagatcactgaagcgcgggtctatgcggcagatcagctatttgcgacgctggaccccacattacgtcgtattgatgtagcggatgtcggtgaaaccgttctggcggatacggtaggctttatccgccatttaccgcacgatctggtggctgcctttaaagctaccctgcaggagacgcgtcaggcgacgctgctgctgcatgtggtcgatgcggcggatgttcgtgtgcaggaaaacatcgaggcggtaaacaccgttcttgaagagattgacgctcacgaaatccccaccttaatggtgatgaacaaaatcgatatgctggacgactttgaaccgcgtatcgacagagatgaagagaataaacccatccgcgtttggctttcagcgcaaagcggcgtgggaataccacagctttttcaggctttgacggagcgtctttccggcgaggtggcgcagcatacgctgcgtttgccgccgcaggaagggcgtctgagaagccggttttatcagcttcaggcaatagaaaaagagtggatggaggaagacggtagcgtcagtctgcaggtacgaatgccgattgtcgactggcgtcgcctctgtaaacaagaaccggcgttgatcgaatacgtgatctagacgcgaagtcattcaggtcgtattgaggcggtagctgagagaatctcaggagctcacaacgaagtgacctggggtaaaaaagccgccactcaagacgcagcctgaaagatgatgtctgtaacggcggttcgtctgaagcatggagtaatttcgccttatcctctgaggtcgaaagacaacggggatcaccgcataacaaatatggagcacaaacatggcgtggaatcagcccggtaataacggacaggaccgcgacccgtggggaagcagcaaacctggcagcaactctgggggaaatggaaacaaaggtggccgcgatcagggacctcccgatctggatgatatcttccgtaagctgagtaaaaaactcggtggttttgggggcggtaaaggcaccggttccggcggcggtagctcatcgcaaggcccacgtccgcaactgggaggccgtattgtcgccatcgccgcggcggcagtagtcattatctgggcggccagcggtttttataccattaaagaagccgagcgcggcgttgtgacgcgttttggtaaattcagccatctggtagagccaggtctgaactggaagccgacatttattgacgacgtcacgccggtgaacgtcgaagcggtgcgcgaactggcggcgtcaggcgtgatgctgacgtctgatgaaaacgtcgtgcgcgttgaaatgaacgtgcaataccgcgtcaccgatccgcagaaatatctgtttagcgtgaccagcccggacgatagcctgcgtcaggccaccgacagcgcgctgcgtggcgtcattggtaaatacacgatggatcgcatcctgaccgaaggtcgtaccgttattcgtagcgatacccaacgcgagctggaagagactatcaaaccgtacaacatggggattaccctgctggacgtgaacttccaggctgcgcgcccgccggaagaggtgaaagccgcctttgacgacgcgattgccgcacgtgaaaacgagcagcagtacattcgtgaagcggaagcgtataccaacgaagttcagccgcgcgccaacggtcaggcgcagcgtattctggaagaggcacgcgcctataaaacccagactatcctggaagcgcagggtgaagtcgcccggtttgcgaagattttgccggaatataaagccgcgccgcagattacacgcgagcgtctgtatattgaaacgatggaaaaagtgctgagccatacccgtaaagtactggttaacgacaagagcggtaatttaatggtgctgccgttagatcagatgctgaaaggcgggaatgcgccggcggcaaagagcgacaatagcgccagcaacctgctgcgcctgccgccgtccacaaagtctaacgccagcggagcaagcaacacgtcgtcctcaaatcagggcgatattatggaccaacgccgcgcgaatgcgcagcgtaacgactaccagcgtcagggggaataacgatgcgtaagtcagttattgcgattatcatcatcgtgctggtagtgctctacatgtccgtctttgtggtcaaagagggcgagcgcggcattacgctgcgttttggtaaagttctgcgtgacgatgagaacaaaccgctggtttacgcgccgggtctgcactttaagatcccgtttattgaatcagtgaaaatgcttgatgcgcgtatccagacgatggataaccaggccgatcgctttgtgactaaagagaagaaagacctgattgtcgactcctacatcaaatggcgtatcagcgactttagccgttactatctggcgaccggcggcggcgatatttcgcaagccgaagtgctgttaaaacgtaagttctcggaccgtttgcgttctgagattggtcgcctggacgtaaaagacatcgtgaccgattctcgtggtcgtctgactctggaggtgcgcgacgcgctgaactccggttcagccggtaccgatgatgaagtagcgaccccggcggcggatgacgcgattgccgaagcggcggaacgcgtcacggcggaaaccaaaggtaaagtaccggtcatcaacccgaacagtatggcggcgttgggtatcgaagtggtcgatgtgcgtattaagcagatcaacctgccgaccgaggtttctgaggcgatttacaaccgtatgcgcgccgagcgtgaagcggtcgcgcgtcgtcatcgctcacaaggtcaggaagaagcggaaaaactgcgtgcggctgctgactatgaggtgacgaaaactctggcggaagccgagcgtcaggggcgtatcatgcgtggtgaaggtgatgctgaagccgcgaagctgtttgccgacgcgttcagccaggaccctgatttctacgcgttcattcgtagtctgcgcgcttacgagaagagcttcgaaggtaatcaggacgtgatggtactgagcccggacagcgatttcttccgctacatgaagacaccgagttcgacgacacgctaaaatagcgtcagcggttttagaccagcaaaaccaccgcatccaaaggatgccggtggttttcttttataagggcgataaatgaattcaacaatctggttggcgcttgctctggtattagtcctcgaagggctgggaccgatgctgtatcccggcgcatggaaaaaaatggtttcggcactggcgcaactgccggaaaatgttttacgtcgttttggcggcggacttgtggtcgcgggagttgtggtctactacatgttgaggaaaacgattggctgagcaaaaagtggtcggatttgccgcagattgagtgcaaaaagtgctgtatatctgaaaaagcgatggtagaatccatttttaagcaaacggtgattttgaaaaatgggtaacaacgtcgtcgtactgggcacccaatggggtgacgaaggtaaaggaaagatcgtcgatcttctgactgaacgggctaaatatgttgtacgctaccagggcggtcacaacgcaggccatactctcgtaatcaacggtgaaaaaaccgttctccatcttattccatcaggtattcttcgcgagaatgtaaccagcatcatcggtaacggtgttgtgctgtctccgagcgcgctgatgaaagagatgaaagaactggaagaccgtggcatccccgttcgtgagcgtctgctgctgtctgaagcctgtccgctgatccttgattatcacgttgcgctggataacgcgcgtgagaaagcgcgtggcgcgaaagcgatcggcaccaccgggcgtggaatcgggcctgcttatgaagataaagtggcacgtcgcggtctgcgtgttggtgaccttttcgacaaagaaaccttcgctgaaaaactgaaagaagtgatggaatatcacaacttccagttggttaactactacaaagctgaagcggttgattaccagaaagttctggatgatacgatggctgttgccgacatcctgacttctatggttgttgacgtttcggacctgctcgaccaggcgcgtcagcgtggcgatttcgtcatgtttgaaggtgcgcagggtaccctgctggatatcgaccacggtacttatccgtacgtaacttcttctaacaccactgcaggtggcgtggcgaccggttccggcctgggcccgcgttatgttgattacgttctgggtatcctcaaagcttactccactcgcgtaggtgcgggtccgttcccgaccgaactgtttgatgaaaccggcgagttcctctgcaagcagggtaacgaatatggcgctactaccggccgtcgtcgtcgtaccggctggctggacaccgttgccgttcgtcgtgcggtacagctgaactccctgtctggcttctgcctgaccaaactggacgtgctggatggcctgaaagaggtgaaactctgcgtggcttaccgtatgccggatggtcgcgaagtgactaccactccgctggcagctgacgactggaaaggtgtagagccgatttacgaaaccatgccgggctggtctgaatccaccttcggcgtgaaagatcgtagcggtctgccgcaggcggcgctgaactacatcaagcgtattgaagaactgaccggcgtgccgattgatattatttctaccggccccgatcgtactgagacgatgattctgcgcgacccgttcgacgcgtaaatctggtacgcctggcagatattttgcttgccgggctaacagtgtgatacattgctgtgtcgggtaagccattacgctatccgacacagtgttaaatcctcgcttttttccttccccgaactgaaataaattagcgacacagcttgtggctggtttatcatcaatataaatgtatttttcccgttttcccttttcctgaggttgatgtgcagttaacgagtttcaccgattacggcttacgtgcgctaatctatatggcgtcgttaccagatggacgaatgaccagcatttctgaggtgacagaagtctacggcgtgtcccgtaatcatatggtcaaaattatcaatcagcttagccgggcgggctttgtcaccgccgttcggggaaaaaatggcggtatccgcctgggtaaaccggctaatactatttgtattggcgatgtggtgcgtgagctggaacccttatcactggtcaactgtagcagcgaattttgccacatcacccctgcctgtcgtctgaaacaggcgctttctaaggccgtgcagagttttctcaaggagctggataactacacgcttgccgatttggttgaagagaatcaaccgctttataaattattactggtggagtgaagtaaacttcattagagatgacaatggaggaacctcaatgtcacaagatcctttccaggaacgcgaagcagaaaaatacgcgaatcctatcccgagccgggaatttatcctcgaacatttaacgaaacgtgaaaaaccggccagtcgcgaagaactggccgtagaactgaatattgaaggcgaagagcagcttgaagccttgcgtcgccgcctgcgcgcgatggagcgcgacggacaactggtctttacccgccgccagtgctatgcgctgccggaacgcctcgacctgctgaaaggcaccgtgatcggtcatcgtgatggttacggtttcttacgtgtcgaaggccgcaaagacgatctgtatctttccagcgagcaaatgaaaacctgtattcatggcgatcaggtgctggcgcagccgctgggcgccgatcgtaaaggtcgccgcgaagcgcgtatcgtccgtgtactggtaccgaaaaccagtcagatagtcgggcgttatttcaccgatgcgggcgtcggctttgtggtgccggacgacagccgcctaagcttcgacattcttatcccgccagaagacgtcatgggcgcgcggatggggttcgtggtcgtggttgaactgacccaacgtccaactcgccgtactaaagcggtagggaaaatcgtcgaagtgctgggcgacaatatgggcaccggtatggcggttgatatggcgctgcgtacccatgaaataccttacatctggccgcaggcggtagagcagcaggtcgccgggctgaaagaagaggtgccggaagaggcgaaagtcggtcgtgtcgatctgcgcgatttgccgctggtcactattgatggcgaagatgcccgtgactttgacgacgcggtttactgtgagaaaaaacgcggcggcggctggcgtttgtgggtcgctattgctgacgtgagctattatgtacggccgccaacgccgctggatcgcgaggcgcgcaatcgcggcacgtcggtttacttcccgtcacaggttgtcccaatgttgccggaggtgctctccaacggtctgtgttcgctaaacccgcaggttgacaggctgtgtatggtctgtgaaatgaccatctcggcgaaaggtcggctgaccggctacaaattctatgaagcggtgatgagctcccatgcgcgtctgacctataccaaagtctggcatatgctgcagggcgatcaggatctgcgtgaacaatatgcgccgctggtgaagcatattgaagagctgcacaacctctacaaagtgctggataaagcgcgtgaagagcgcggggggatctcgtttgagagcgaagaggcgaagtttatctttaacgccgaacgtcgcattgagcgtatcgaacagacccagcgtaatgacgcgcataagcttatcgaagagtgcatgatcatggcgaatatctcggcggcgcgctttgtcgaaaaagctaaagagccggcgttattccgtattcatgataagcccaccaccgaagcgatcacctcattccgctccgtactggcggagctggggttggagctgccgggcggaaacaaaccggaaccgcgcgattatgccgaactgcttgaatcgattgccgaccggccggacgccgaaatgctgcaaactatgctgctgcgttcaatgaagcaggcgatttacgatccggaaaaccgcgggcactttggcctggcgttgcagtcttatgcgcactttacctcgccgattcgccgctatccggatctttctttgcaccgcgccattaagtacctgctggcgaaagagcaagggaacaagggcaacaccacagaaacgggcggttatcactactcgatggaagagatgttgcagctcggtcagcactgttcgatggcggaacgccgcgctgatgaagcgacgcgtgatgtctccgactggctgaaatgtgactttatgctggatcaggtaggcaacgtctttaagggcgtgattgccagcgtcaccggtttcggcttctttgtccgtcttgatgaactgtttatcgatgggctggtacacgtttcctcactggataacgattactatcgcttcgatcaggtagggcaacgtctgattggcgagtccggcgggcagacatatcgcctgggcgaccgggtcgaggtacgcgtcgaagcggtgaatatggacgaacggaaaattgactttagcctgatctccagcgagcgcgcaccgcgtaacgtcggcaaaacggcgcgtgaaaaagcgaaaaaaggtgaaagtaaaaacgccggtaaacgtcgtcaggtaggtaaaaaagttaacttcgagcctgatagcgccttccgcggcgagaaaaaagcgaagccgaaagcagcgaagaaagacgcgagaaaagcaaaaaagccatcggctaaaacgcagaaaatagccgcagcgaccaaagcgaagcgtgcggcgaagaaaaaagcggcagagtgagcaataccctcttcaaacagaagagggtcaattatctgtaggccgggcaagcgtagcgcccccggcaaaacgtaaacaacgagtacattaatgagcgaaatgatttacggcatccacgcagtgcaggccctgctggagcgcgcccctgaacgttttcaggaagtctttattttaaaaggccgtgaagataaacgtctgttgccgctgatccacgcccttgagtcccagggcgtggttatccagctggcaaaccgccaatatctcgacgagaaaagcgacggtgccgtgcatcagggtattatcgctcgcgtgaaaccaggccggcagtatcaggaaaacgatctgccggatctgatcgcattacacgatcgcccttttttgttgatcctcgatggcgtcaccgatccgcataatcttggcgcctgtctgcgcagcgccgatgctgcaggcgtacatgcggtaatcgtgccgaaagaccgctccgcgcaacttaacgcgacggcgaagaaagtcgcctgcggcgcagcggaaagcgtgccgttgatccgcgtcaccaacctggcgcgcacgatgcgcatgttgcaggaagagaatatctggattgtcggaacggcgggcgaggctgaccatacgctgtatcagagcaaaatgcctggccgcatggcgctggtcatgggcgcagaaggtgaaggtatgcgtcgtctgacccgtgagcactgcgatgagctgatcagcattcctatggccggtagcgtgtcgtcgctgaatgtctctgtggcgaccgggatttgtctgtttgaagccgttcgccagcgcacctgatgctgatagtattttttaagaaaaaaccatccataatcggatggtttttttttatctttgactggtaatataaaaaacaaaacctaccctgtaatttcttttatttataaaaatgagatagagataaaaatatggcatggactccacggacgctggcggatgcattaaacaacatcgccgaattagatattgatatagaaaataatgaatcttcattaataataaaaatgaatgattatggcgatttaccactggcggttttatttacctcgcaacaaatagttatcgagacttatatctgtccggtaaatacgattagagataccgcggaatttaatcttttcttgctgagaaatcagaaggttttaccgctgtcttcggtcggtattacccaggtaaaacaggaggaatattatgtcgcttttggcgcgctgtcgttaaattcgtcgcttgccgacgtgatgctggaaatcaccacgcttgtagaaaatgcgttggatatcgctgaaataacacaagtctattcacaggaataatacaggcggcttacatgggaattttaaaaagtttgttcacgttaggtaaatcattcgttgctcaggcagaggaagccattgatgaagcacagggtgtacgtatgctggagcagcatattcgcgacgcaaaagccgagctggataaagcgggtaaatccagagtggatttattggcgcgggtgaagctaagccatgacaagctgaatgatttacgtgagcgtaaagccagccttgaaacacgggcgttggcggcaatgagtaagaatgtcgacgccgctttactcaacgaagtggcggaagaaatagcccgtctggaaaatgccattcttgccgaagaacaggtgctgactaatctggaagcctctcgcgatgcggtggagaaggccgtaacggcgacaggccagcggattgcgcagtttgagcagcaacttgaagtggttaaggcgacagaagccatgcagcgcgcgcagcaggcggtgacgacctcgaccgtcggagccgcgtcgaatgtgtctacggcggcggagtcgcttaaacgtttacaaacgcgtcaggctgaacgccaggcccggctggatgccgccgcgcagctggaaaaagtcgccgatggacgcgacctggatgaaaaactggcgcaggccggtattggcgcaaccaataaaagcaatgctcagggtgtgttggcgcgtttacagcgtcaacaaggcgaataatgctctttacgtggattgtcaaaacctgccagcgtcatttgtccagactgacctggcccgctttgctgggcctgtttatcgggcagtatctgctttgttatctggtgctgcgcctgttgcgcgaaagcgcgttggtgagccagttaagcgattttatctattactgctcggtggtgggttccacattaggttttggcgatcttagcccgcagacggcgccaggacgtctgttcaccgcgctgtggcaaattccggttagcgtcgggttgttcggcgcgttaatgggaaaagtgattgcgcaggtacagggaatgttagcgaaaggaataacgggcatgggcgattatcgccatttacaccatcatatgctggtgattggctggcggggtcatcaaaccgaaaagatgatctcattgctgctatatgacaagcggcgtgcctttgaacgggttctgctgtgcgaactggaagatattcagcatccgctgccgggtaataactgggtggattttatccgcatcagcaactttaacgatccgcaggaacaccagcgcatggggctggagcagtgccagagcgtgattattttcgctcgtaccgatgagcagaccttcacggcggcgctctcgctggcagactatgtacccgcgcagtgccatattgtggtttatctggaagacgagcgttatgccggattactggaaacccactgcccgcgcatggagatagtccgtaacctttccgctgaacaactttcccgttccattcaggacccaggatcatcgcaatctgtcgcttccattatgaatccgatgctgggcgataccggattcgcgctgcctgtcccggcttctgtcgcgcctatgcgatacggcgcgctaatgcgttatatgaagcttcatcatgacgcgacggtgctggggatcagtcactgcaagaatggtcgtggtatggaattgaatccggtgatttcaactgaagtcagaggcggtatgtggctacatctggtcggtaataatcgcattctggctgaagaggtcgcatggcaagagatagaggttcccctatgatgcaattttttcagcgtttgctcggtaaaacaagcgcgccagcgccgattcgcggaccattaggattacatcttaacgccggtttcacgctggatacgctggcatttcggctactggagtcgtcgttgctggtggcgctaccgggtgaaaaatacactgtcgcggcagcgagtcgcatagatttaggcggcggcagtcagatttttcgctactacacctctggcgatgagtttctacaaattaacaccactggcggcacggatgttgacgacattgatgacatcaaactttttgtatatgaggaaagtttcggtattaacgaggaacgtcactggcgttcagccattgcgccagcggcaatagggccgatgacgctcaactggcaagaacggcgctggcagcgcttttttaaccatgaagagccgggcaatattgaacctgtctacatgctggaaaaggttgaaaatcagcaggcagagaaatgggacgttcacaattttacgatgggcttccagcgccaggtgacggatgacgcctgggagtatcttctattgaacggggaagaatcatttaatgagcgcggtgagcctgaatgggtgttttcacgcgccctcggcgtggatatcccgctcacttcactgacggttattggttaagcacatacagggaaattatgcatatactggacgcattactggctttctgcgcctatttttttattggcgcggcaatggtcattgtatttctttttatttactcaaagataacgccgcataatgaatggcagttgataaaaaataacaatactgcggcatcgctggcctttagcggtacgttgctgggctatgtcatccccttatccagcgcggcgataaactcggtcagtatcccggactattttgcctggggcggcattgcgctggtgattcaactgctgatttatggttgcgtaaggttatacatgcctacgctgagcgaaaaaattattcatcacaacgtggcggcggggctatttatgggaaccgcagcgctggctggcggtatttttaacgctgcctgtatgacatggtaacggaagatcatggcaaaaaaacgaaaatccagaagcacatccggcgtaggccattcggcaataagacgaatagccgaaccggtcaatccctttgagcggcaacgaaatcgctacacgccaaaatgcctgacgctggcgattatgggtggagcggccttttttctcctgaaagggtgcggtgatggcggcaatagtgacaacgacggcgatgggacgttttacgccacggtgaacgactgtattgacgatggcaatagcgccagcgtttgcgctgacggctggaataatgcgaaaacagaattttacgctaatgtgcctaagcaattgacgcaggagcgctgtcagacgcagtttggcgattgctactttgatattaccgagcggagctgggttccggtattaagcggctttttactcagccgcgcgattcgtcagaaccgtgatgaacaatacatctatagcagcggcggttcatcttatgtctcccgtcccgtctggcgcaccacatccggcgactatgcgtggcgcagcggcacagggaaaagcgataccgcgaccagccctggttatatcacacggaaagcgtccaccgtctcccgcggcggctatggccgttcttccagcgcccgcgggcactggggaggctaaccatgctacgacacaacgtaccgatacgtcgggatctggataagatcgcctgcgatcacggttttgactttcatgttatcgataacgaaatttactgggatgaaagccgggcctaccgttttacattacggcaaattgaagaacagatcgaaaaaccgaccgcagagcttcatcagatgtgtctggagattgtcgagcgggccgtccgggatgagcagagcatgcagcagctggcgatcccgccattgtactgggatgtcatcgccgaaagttggcgcagccgcgatccttcgctttacgggcggatggatttcgtctggtgcggcaaagatccggttaaattgctggaatacaatgcggatacgccgacgtcgctctatgagtcctcctactttcaatggctatggctggaggatgcccgtcgtagcggcgccatcccgcgtgatgccgatcaatacaacgcgatacaggagcggctgatcgcccgcttcagcgagctgtacagtcgggaaccgctctacttttgctgttgtgaagataccgacgaagatcgcacgacggtgctgtaccttcaggattgcgcgcagcaggcggggcaggaaacgcgatttatctatattgaagaactggggcttggcgtaggcggcgtgctgaccgatctggacgataacgtgattcgccgcgcctttaagctctacccgctggaatggatgatgcgcgatgacaacggcccgctgttgcgaaaacgtcgtgagcaatggattgagccattgtggaaaagtattctgagtaacaaagggctgttgccgttattgtggcgctttttccctggccatccgaatcttctgccggcctggtttgagggcgaaaaatcgctcgcagcgccaggcgaaagcagcgtacggaagccgatttattcacgtgaaggcggcaacgtcacgattttcgacgagcggcaaaatgttatcgatcatgccgacggcgactacgctgacgagccgatgatttaccaggcgtttcagcctttgccgcgctttggcgatagctatacgctgattggcagttggatcattgacgatgaagcctccgggatggggattcgcgaggacaatacgctaattaccaaagacacttcccgtttcgtcccacattatattgccggttaatcatacttttgtgatcttgctccggcgtcaatggcgcagtcatgaccatacttgacttcagcgccattgaaggagggagacaccatgtcctggcaaacacataccgtctttaatcaacctgctccgctcaataacagtaacttattcctgtctgatggcgcgctgtgtgaagcggtttcccgggaaggcgcgggatgggatagcgatcttctcgccagcattggccaacaactgggaacggcagaatcactggaactggggcgtctggcgaacgcgcatcctcctgagttgctgcgttacgatccccagggacagcgtttggatgacgttcgctttcatcccgcctggcacctgttgatgcaggggctttgcgctaatcgggtacataacctggcctgggaggaggaggcaagggcgggaagttttgtcgcccgggcggcgcgttttgtattacatgctcaggtagaagcgggaacactctgtcctgtcacgatgacctttgccgcgacaccgttgctattgcagatgcttcccgccactttccatgactggctggcgccgctgcgcagcgatcgctacgattcgcatttgctgccgggcgggcaaaagcggggtctgctcatcggcatgggaatgacggaaaagcagggcggatcggacgtactcagtaatacgacccacgcggagcggctggcggatgattcatatcggctggtgggacataaatggtttttctctgtgccgcaaagtgatgcgcacctcgtgttggcgcaggcaaaaggaggactatcctgtttctttgtgccgcgtttcctgccagacgggcaacggaactctgttcgtcttgaacgcctgaaagataaactcggtaatcgatctaatgccagcgccgaagtcgagtttcaggatgctatcggctggcggctgggagaagagggcgaagggattcggcatatcttaaagatgggcggtatgacgcgtcttgactgcgcgctcgggagtcatggcttaatgcggcgcgcattttcagtcgccatttaccatgctcatcagcgtcaggcttttggtaagccgctgatcgatcaaccgttgatgcgacaaaccttaagtcgtatggcgctatgcctggaggggcagacggcgcttttgtttcggctggcgcgcgcctgggagcaacgtcgcgaggcgaaagaggcattatgggcgcgattattcacgccagcggcgaaattcgccatctgtaagctgggaatcccttttgtggctgaggcgatggaggttctcggcgggatggggtattgcgaagagagcgaactcccgcgcctgtaccgtgaaatgccggtgaacagtatctgggaaggttccggcaatatcatgtgtctggatgtactgcgggtgctgacaaaacaacacggcgtctatgacgtattgagtgaagcttttgcggaagtcaaaggtcaggatcgccattacgaccgcgcggtacgtcagctacagcaacgtttacgcaaaccggacgaagcaatgggcagagagattacgcagcagcttttcttgctggggtgcggagcggaaatgctgcgtcatgcctcgccgccgctggcgcaagcgtggtgtcagatgatgctggatacacgcggcgaaatgccgctgcctgcccaggtgcaaaatgatttactgttaagggcgaccgggggactgcggtaacgtttgacctgtagtacatgccatccggcgcgagccacgcggcatcaggcatagagtatcgcctgtacgcgccagttatccgactgttgttcttcatacatttgaataattctgtaccaggacgcaccctgttcatcggctttcagggcgataatccgctctacatcctgtgggtttcctgcaacattactgaccgagatcaggccgatttcattcagacccgttacgcagtcagcactggcgaattcggcagactgtgccgtcgtactcaccagtccggcagaaagcagcagtgaggataaggcaagttcttgtttcatcgtcagctccttattacataccccgcatttaacaggacgctccatcacggtaaacctgtttgtttattgtgcacaggtaaacgcataagggcgcaaagcaatgtaaaactgactaaaaatcaatctactgttattgacgatacaaaatggcttgtgaataccactggccggttacaaccgtttcatcaaccattaagataacgtaataatcggctttcgcagcgacggctttcgctctgatttcatctattgcatcatccggggagccccgaaccagcgcgcttacggtccccatccgctgtagtccttgcgtttgatcgcgacggatttcctgcgggtgatcggcgacaggcggcgcaggttgcggcgtaccctgcagcacgctacacgcgcttaataacagcgctgctatcaatgaagcaaaccgacgcataactctatctcgtttcctgataatcatagtgtaatgccttattgatttccctttagggggaatgttcccgaagtgttacctgtcacgcgattttcgaatgaaaacgttgcgaaagcgtaacccagttctcaaacattatgaattattgcgctatccataaacttgcgttaagtatttctccgtggcataccggataaaaaggagagaataatgatagcgattgaaacacgacaattagccggaggcgtcgtactacatgccttcccggaagggaaacgcgccgtgccgcttccctgtgtggtgttctatcatggcttcacctcctccagcctggtttatagttattttgccgttgccctggcacaggcaggattccgggtagtcatgccggatgcgccggagcatggcgctcgcttcggcggcgactcacagggacgaatacaccgattctggcagattctgcaccaaaacatgcaggaatttacgacgttacgtgcggcgattcaggcggaaaactggctacttgacgggcggttggcggtgggcggcgcatccatgggcggtatgacggcgctgggcattatgacgcgtcaccgagaggtaaaatgcggggccagtttaatggggtcgggctattttaccgggctcgcccggacgcttttcccgccgttatccccgcagaacccggcacagcaggcggaattcgacaatatcatcgcgccgctacgtgaatgggaagtcacacaccagttagagcgactggccgacaggccgcttctgttgtggcatggtcaggaggatgacgtggtgcctgctatcgaaaccttccggctccagcaggcactcgccgcggcgaagctggataagcatgtgacctgtttatgggccgcaggcgtgcggcatcgcattacgccagaagcgttgtcggcgacggtagcgtttttccgacagcatctttaaacgcggagtatgcttacaccctgggcttcaagctgttgcaaaacctgcggattggcatttttgccggtaatcagcatagcgatctgatcggcgcggctgaacagcatccccgcgcgctcgccaattttactgctatcgaccagcgcgaccagtttcccgacgacgctgagcattttttgttccgccatggcggttagcatatcggtcttgtacaggccatctgcggttaagccctttccgctggtaaacatccagtggccagcatagagactgttttcacttccctgcgggctcagggtaatcgactggcttttattatactgaccacccatgataatcacgctgtcatgctcttgatcgatcagataattcgccagcggcagatagttggtaatgatctgtaccggcttcccgcacatttcacgccccagcaggaaagcggtggagccgcagttaatcactacgctttcacccgggtttaccagctgcgacgccgctttcgcgatgcgtactttttcatcgtggttttgcgcctggtgcagattcatcggcgtccagcggggccgctgttgggtaatggcctctgcgccgttgcgcacttttttaagtttcccgctttcgtcgagcttgttgatgtcgcggcgcgctgtcgccggggagatccccagacgctcaatcacgttttcgacggtaacaaagcccaactgtgccagcatatccagcagtatttgatgtctttgtgcttcagtcatgagctattccgatacaaattgatttgaaaagatgatatttgaaatagcctggaaatactaaagtaaatggaaaaaatgccgggtaatcccggcatgatatcgactcacaggaaggatttgaacggtagatcgggttcaatggtaaagcaatcgtcaaacccacgcggatagtggtattcgaaattgtctttatccagcggccaggtaaacttgccgccaacctgccagataaacggtttaaaaccatacttcaggcgatctttcttcatttcccatagcacgcggatctcttgcggatcggcctggaagttcgaccagatatcgtgatggaacgggatcaccactttggtattcagcgattccgccatgcgtaaaatatccgcgctggtcattttgtccgtaataccgcgcgggttttcaccgtaagaaccgagcgcgacatcaatttgatgttcgttgccgtgtttcgcgtagtagttggaatagtgagaatcgccgctgtgatagagattgccgcccggcgttttaaacagatagttaaccgcgcgtacatccatgccgtccggcagtacgccagcggctttctgatcggcgggcagggtgattaatgcggtgcggtcaaaggcatcaagcgcatgaatttcaatatctttcactttcacgacatcgcccggttttaccacgatgcagcgttctttcggcacgccccagccaacccataaatccacgcaggtctgcgggccgataaacggaacatcatcggcgcaattctgcattacggcagccgcgacattgacgtcaatgtgatcgttatggtcgtgggtcgccaggacggcgtcaatctgacggatagcgaaaggatcgagaacaaacggcgtggtgcgcaggttaggctgtaattttttgacgccagccatacgctgcatctggtggccggttttcatcaacggattaccgtggctctgtttaccggtaccgcaccagaaatcgacgcatacgttagtgccgccttcagattttagccagatcccggtacagcccagccaccacatagcgaacgtacccggcgcgacctgctcttgttcaatctcttcgttcagccagcttccccactccggaaacgtgctcagaatccatgattcacgcgtgatgctttgtactttactcatcgcatttaccttcatgtttgttcaaaatggttcaaaacgtgatttgttttgattaatcctgacactattttctcaagaaggcaatgggctattttttgactttttggaaggagagaacgcagtcaggagaagatttaatcttgtctggcgtcatgtgaatgtttgcatctttatgattttacttattttaatgaaaaaatgagttacctataagtaaaccatgtattaagtgtgctaattatttgcgcgctacgtcacagttaatcaaatttaatcttgttgtgattacttttgaaaattaaagtgaagggactttatcctgagcgcctgtgactcagcaacctcgtctaccggagatcgttatggagatcctctacaacatctttaccattttctttaatcaggtaatgaccaatgccccgctattactgggtattgtgacctgcctgggctatatcctgctgcgcaaaagcgtcagcgtgatcatcaaagggacgatcaaaaccatcattggcttcatgctgctacaggccgggtccggcattctgaccagcacctttaaaccggtggtggcgaaaatgtctgaggtctacggcatcaacggcgcgatttccgatacctatgcttcgatgatggcaacgatcgaacggatgggtgatgcgtatagttgggtaggctacgcggtgttgctcgcgctggcgctgaatatttgttacgtcttgttgcgacgcattaccggtattcgcaccatcatgttgaccgggcacatcatgttccagcaggcggggctgattgcggtctctttctatatcttcggctattccatgtggaccaccattatctgcacggcgatactggtttccctgtactggggtattacctccaacatgatgtacaagccgactcaggaagtgacggacggctgcggtttctccattggtcaccagcagcagtttgcttcctggattgcctataaagtcgcgccgttcctgggcaaaaaagaggaaagcgttgaagacctcaaactgccgggctggctgaacattttccatgacaacatcgtctccacggcgattgtaatgaccatcttctttggtgccattctgctctcttttggtatcgataccgtacaggcgatggcgggtaaaacccactggacaatctatatcctgcaaaccggtttctcctttgcggtggcgatcttcatcatcacccaaggcgtgcgtatgtttgtcgccgagctctctgaggcctttaacggtatctcccagcgtctgattccgggcgcagtactggcgattgactgcgccgctatttatagcttcgcgcctaacgcggtggtctggggctttatgtggggcaccatcggccagctgattgcggttggcatcctggttgcctgcggctcctcgatcctgattattcctggctttatcccgatgttcttctctaacgccactatcggcgtgttcgctaaccacttcggcggctggcgtgcggcgctgaaaatttgtctggtgatggggatgattgaaatctttggttgcgtctgggcggtgaaactcaccggtatgagtgcctggatgggtatggcggactggtcgattctggcaccgccgatgatgcagggcttcttctccctcggtatcgcctttatggccgtcatcattgtaattgcactggcttatatgttcttcgctggccgcgcactgcgcgcagaagaagatgcagaaaaacaactggcagaacagtctgcttaataaggagttttgattatgaccgtacgtattctggctgtgtgtggcaacggacagggcagttccatgatcatgaaaatgaaagtggaccagtttttaacccaatcaaacattgaccacacggtaaacagctgcgcggttggcgagtacaaaagcgagttgagcggcgcggatatcatcatcgcttctacccatattgcaggcgaaatcagcgtgaccggcaacaaatatgtggttggcgtgcgcaacatgctgtcgcctgcggattttggcccgaaactgctggaagtgatcaaagaacatttcccgcaagacgtgaagtaaggatgcaacatgaaattacgtgattcactggcggagaataattctatccgcctgcaggctgaagcgaatacctggcaggaagccgtcaagatcggcgtcgatttactggtggctgcagacgtggtagagccgcgctattaccaggcgattctggatggcgttgagcagtttggcccctattttgtgattgcccccggcctggcgatgccgcatggccgcccggaagaaggggtgaagaaaaccggtttttcgctggtgaccctgaaaaagccgctggagttcaaccacgaagataacgacccggtcgatattctgatcaccatggcggcggttgatgccaacactcaccaggaagtgggcatcatgcagatcgtcaacctgtttgaagacgaagctaattttgaccgtttacgcgcctgccgtaccgcgcaggaagtcctggatctcattgaccgcaccaacgcggcagcttaagaaggaattgaaaatgtcattaccaatgttgcaggtcgcgctggacaaccagactatggatagcgcctatgaaaccactcgcctgattgccgaagaagtcgacattatcgaagtgggcaccattctgtgcgtgggcgaaggcgtgcgtgcggttcgcgacctgaaagcgctttacccgcacaaaatcgtgctggcggacgccaaaattgccgatgccggtaaaatcctctcccgtatgtgtttcgaagccaacgcggactgggtgaccgtgatttgctgtgcggatatcaacaccgcaaaaggcgcgctggatgtggcgaaagagttcaacggcgacgtgcagatcgaactgaccggttactggacctgggaacaggcgcagcagtggcgtgatgcgggtattcagcaagtggtttatcaccgcagccgtgacgcgcaggcggcaggcgtggcgtggggcgaggcggatattaccgcgattaagcggctgtccgatatgggctttaaagtgaccgtgaccggcggactggcgctggaagacctgccgctgttcaaaggcattccgatccatgtctttatcgcggggcgcagcattcgcgatgccgaatcgccggtagaagccacacggcagttcaaacgctccattgcccaactgtggggctaaggagcggctatgctgtcgaaacaaattccgctcggcatctatgaaaaagcgctccctgccggggagtgctggctggagcgcctgcggctggcgaaaacgctgggttttgacttcgttgaaatgtcggtggacgagaccgacgcccgactggcgcggctcgactggagtcgcgagcagcgcctggcgctggtgagcgcggttgctgaaaccggcgtgcgtgtgccgtccatgtgtctgagcgcgcatcgtcgttttccgctcggtagcgaagatgacgcgatacgggcgcaggggctggagattatgcgtaaagcgattcagtttgcgcaggacgtcgggattcgcgtcattcaactggcggggtacgacgtttactatcagcaggccaacgacgaaacgcgttgccgcttccgcgatgggttaaaagagagcgttgatatggccagccgcgcccaggtgacactggcgatggagatcatggactacccgctgatgaattccatcagtaaagcgctgggctatgctcactacctcaataacccgtggttccagctctatccagatatcggcaatctgtctgcctgggataacgacgtacagatggagctacaggcgggaatcgggcatatcgtcgcggtacacgtcaaagatactaaacccggcgtgttcaaaaatgtgccgtttggcgaaggcgttgtcgatttcgaacgctgcttcgaaacgctcaaacagagtggctattgcgggccctatctgattgagatgtggagcgaaacagcagagaacccggcggcagaggtagcgaaagcgcgtgactgggtgaaagcgcgcatggccagcgccggtctggtggaggcagcctaatgcaaaagctcaagcagcaggtatttgacgctaacatggatttgccccgttatgggctggtgacctttacctggggcaacgtcagcgctatcgatcgcgaacgcgggctggtggtgattaagccaagcggtgtcgcctatgaaaccatgaaggtagatgacatggtggtggtggatatggatggcaaagtggtggagggacgttatcgtccttcttccgataccgctacccatctggcgctgtatcaacgctatccgtcgcttggcggcgtcgttcatacccactccacccacgccacggcatgggcgcaggcggggatggctattccagcgctcggcaccacgcacgcggactatttctttggcgatattccttgtaccagagcgttaagcgaagaagaagtgcagggcgagtacgagctgaacaccggcaaggtgatcatcgaaacgctgggcgaggtggaaccgctgcatacgccaggtattgtcgtgtatcaacacgggccgttcgcctgggggaaagatgcgcacgatgcggtacataacgcggtcgtcatggaggaagtggcgcgaatggcgtggattgcgcgcggtattaacccggcgctgaatcccatcgacgattatctgatgaataaacacttcatgcgtaagcatggcccgaatgcgtattacgggcagaagtgaagtatgagctccggaatgtgaatattatcgggatgtcacaggtctaattccggagccatctttccgcgaaaaaagccccctgctcagggggcaaatcaactatggctttttcgttggttttcctgatgctagcgataaatattcgcgctggcgtgtatattgccgttgctacccggttcccggataagtatgacgtgataatacattgcgtttcgcacgtcggcctcttcattcagcgccagattggcttcactttccgtggcgaagttatggttgatgtagattacgcctaagctgcgcacatcatccatatttctggcctgatgattatttaactcgacggctgccgttgccgttatgccaggcaaaagcgcagccagaaataacattatccgggctcgcatagagtacctcctcagcagcgcggtctggttggcgatatccccctttagtgaatcgcttctggtttaattttaaccataacccgccgcagagatggcgaccttttctgatgctgttgttcaaaaaattatcgcattgtcgctttttacctgattaacaacccattgatgtatgccgccatgtttaagaaatcctgtgtggcaaaaaagtgcgctgaccacagtgtcaatttctctgccgcaacaggccgtttatagtggcatgcgatatgaagttaatatctcagcagcaaaatgtgacgggacaggcgttacgttcggcacgataaataattgtacaatcaccttgagtttgcccgcaggcgccagtattataacgcgtcatttttcagccgacctttaacacgttccttgcctccatgggccgcggctgacccagacaggaggctgaataatccgtaaggagcaattcgatgcgtcattacgaaatcgtttttatggtccatcctgaccagagcgaacaggttccgggtatgatcgagcgttactctgccgccatcactggcgcagaaggcaagatccaccgtctggaagactggggccgccgtcagctggcttacccgatcaacaaactgcacaaagcgcactacgttctgatgaacgttgaagcgccgcaggaagtgatcgatgagctggaaactaccttccgcttcaacgatgccgttatccgcagcatggttatgcgtactaagcacgctgttaccgaagcttctccgatggttaaagcgaaagacgagcgccgtgagcgtcgcgatgatttcgctaacgaaaccgcagatgatgctgaagctggggattctgaagagtaatttctgatgaccaaccgtctggcgttgtccggcaccgtgtgcagggccccccttcgaaaggtcagtccatcaggaattccgcattgccagttcgtgcttgagcatcgttctgtgcaagaggaagccggctttcaccggcaggcgtggtgccaaatgcccgttattgttagcggacacgaaaaccaggccattactcacagtataacggtcggcagccgcataaccgttcaggggtttatttcttgccacaaggcaaagaacggtctgagcaaaatggttctgcatgccgagcagattgaattgatagattctggagactagccatatggcacgttatttccgtcgtcgcaagttctgccgtttcaccgcggaaggcgttcaagagatcgactataaagatatcgctacgctgaaaaactacatcaccgaaagcggtaagattgtcccaagccgtatcaccggtacccgtgcaaaataccagcgtcagctggctcgcgctatcaaacgcgctcgctacctgtctctgctgccgtacactgatcgccatcagtaatcggtcacggtccattaatacgactttgagaggataaggtaatgcaagttattctgcttgataaagtagcaaacctgggtagcctgggtgatcaggttaacgttaaagcgggctatgctcgtaacttcctggtaccaaagggtaaagctgttccggctaccaagaaaaacgttgaatacttcgaagcacgtcgcgctgaactggaagctaaactggctgacgttctggctgctgcaaatgcacgcgcagagaaaatcaacgccctggaaaccgttactatcgcgtctaaagcaggcgacgaaggtaaactgttcggttccatcggtactcgcgacatcgctgacgctgtgactgcggctggcgttgacgtggctaagagcgaagttcgtctgccgaacggcgttctgcgtaccactggcgaacacgaagtgaacttccaggttcacagcgaagtattcgcaaaagttatcatcaacgtggttgctgagtaatcaggcattctcgtttttgctagcaacgaaacgtcggcccagcgccgacgttttgcttttttaaccccatcgcttttcgactggctatctccccctcttttcgcgataatcaaaaataaaacattattttaatttcttggtgaaagaatggatacccaacgccaggcctccccgtttgcccgcaaaaacgtcgtttatgtgtgtgccgcattttgttgcttgctatggggcagcgcttatccagccatcaaaagcggttatgacctctttcagatagccaccgatgatatcccttctaaaattgtttttgctggttatcgttttttgtttgcgggtgggttgctactactgttcgcgctgcttcagcgtaaaccgattggtcggtttcgtccgcgccagtttgctcagttgacgttactggggctgactcagacgtcgctgcaatatctctttttctatatcggccttgcgttcacctccggcgtgaaaggctcaatcatgaacgcgacaggcacattcttcagcgtattgctggcgcactttatttatcagaacgaccgattgagctacaacaaaacgctcggctgtattctgggctttgcgggcgtcatggtggtgaacgtcagcaacggcctggatttcagctttaatctgccgggagaaggctccgtggtgctggcggcgtttattctttctgcggccacgttgtatggcaaacgtctctcgcagacggtcgatccgatggtcatgactggctatcaattggggattggcggtctggtactggtcattggcggttacgtttttggcggtacgctgacgatacatggcttctcgtcggtggcgattttagtctacctgacgctgctctcgtcggtcgcttttgcgctatggagcattttactcaaatataatcgcgtggggatgattgcgccgtttaactttctgatcccggtttctggcgcggctctttcggctatttttctcggcgagaatatattggagtggaaatacatgattgcgctggtgctggtgtgttcggggatttggtgggtgaataaggtgaagcggtaatgcttcacctgaacgaatagggtatagacggggtaaggcgcagccggcgttactgtgcgcgaataaaactgccgtcaggctgacgcgtaaacagcacctgttgaccgttatcgccatctatcgttaaacctgtcaccaccccgctggcattctggcgaattttaatcatttgaccatttttgagattactcagcggcttgccagcgccttctacctgcgccattgcataaacgtctgtcgggggcagcccgtggtcacggaacagttgcgccagagttttaccagactctacccggtacgagcgccactgttgaccgatgccgctatcctgctggaaaggctgcgtctgcggctggttttgttcttccggctggccttcctggataggttccggcgcaacgggcgccacctgatccggatcgttttgcggcgcgaccagctgcgcctgaagctgggcctccgtcggcggctgtgattgcgattgcagatccaattgcgcttcccgcgtgacgacaggtgagtcgctggtctcgctggcgggcagcaggaaaccgatcaccagcacgatagcggcaatgataatgccacgacgatgcataggcggcagcggttccatgatgcgaaaattatccggcgcgtgccagattttcgccagggttggttttaattcaaagcgcccgggcatggtttacctcctgctccgcatctcgttccttaatcatagagtatagatggctaacgctatgatactggtagtgctatccgctttcgtgacatcaatacggataatctattgtttctttttccctgcgatttgtcatcctccctgagacaaagttttaccagaagaagcgtggctgttatgctgcccgctacttttttgatatccgatgaaggaaaaataatggccaccccgacttttgacactattgaagcgcaagcgagctacggcattggtttgcaggtagggcagcagctcagcgaatccggtcttgaagggctgttgcctgaagcgctggttgcaggcattgctgatgcgctggaaggtaaacacccggcggttcctgttgatgtggtgcatcgtgcgctgcgtgaaattcatgagcgtgcggacgcggtgcgtcgtgagcgtttcaaagcgatggcggccgaaggcgtgaaatacctggaagaaaaccgcgaaaaagacggtgtgaacagtactgagtctggtttacagttccgcgttctgacgcagggcgaaggcgcgattccggcgcgtaccgaccgcgtacgcgtgcattacaccggtaagcttattgatggcaccgtatttgacagctccgtcgcgcgcggcgaaccggctgaattcccggtaaatggcgtgatcgccggctggattgaagcgctgactctgatgccggtaggttccaaatgggaactgactatcccacaggagctggcctatggcgagcgtggggccggggcatctattccgccattcagcaccctggtgtttgaagtggaactgctggaaattctgtaagcgccccgggtttgccggatgatggcgtaaacgccttatccggcaaccctggcttcagcagatgccaatattttattttgcaaatggcgtcgttacgtgtatttttgtgagctaattcgcattatcaaagtgatataacactcattttaaacataaaattaacattgtatttgaatcttagtattcatcccgccgattcttacctaatatcgatgagtcctgataacaggatcgtcgtatcatagaccaaaggccgtagagcccgcacaacacagacaggtacaggaagaaaaacatggtagatcaggtaaaagtcgcagccgacgaacaggctccggctgaacagtcgctacggcgcaatcttacaaaccgtcatatacagcttatcgctattggcggcgctattggtaccggtctgtttatgggatcgggtaaaacgatcagtctcgccggaccgtcgatcatttttgtgtatatgatcatcggttttatgctttttttcgtgatgcgcgccatgggggaattgctgctctcgaatctggaatataaatcgtttagcgattttgcttccgacctgcttggcccctgggcgggatatttcaccggctggacgtactggttttgctgggtagtgaccggtatggctgacgtggtggcgattaccgcctacgcgcagttctggtttcccggcctttccgattgggtcgcctcgctggcggtagtgatcctgctgctaagcctcaacctcgccaccgttaaaatgtttggtgaaatggaattttggtttgctatggtcaaaatcgtcgccattgtggcgttgattgtggtcgggctggtgatgattgcgatgcactttaaatcgccgacaggcgttgaagcgtctttcgcgcatctgtggaatgacggcggctggttcccgaaaggtattagcgggttctttgccggtttccagattgcagtgttcgctttcgtgggcattgagctggttggtactaccgccgcagaaactaaagatccggaaaaatcgctgccgcgcgcgattaactcaataccgatccgtatcatcatgttctacgtctttgcgctgattgtcattatgtcggtgacgccgtggagttccgtggtgccggataagagcccgtttgttgagctgtttgtactggtgggtctgcctgccgctgcgagcgtgatcaactttgtcgtgctgacctcggcggcgtcttccgccaacagcggcgtcttctcgaccagccgtatgctgtttggcctggcgcaagaaggcgtggcgccaaaagcgttcgctaagctatcgaaacgcgcggtaccggcgaaaggcctgaccttctcctgtatctgcctgctgggcggcgtggttatgctgatggtcaacccgagcgtgattggcgcattcaccatgatcactacggtttcggccatcctgtttatgtttgtctggaccatcattctgtgttcatacctggtgtaccgcaaaaagcgtccccacctgcatgaaaaatccatctataagatgccgctcggtaagctgatgtgctgggtctgcatggcgttctttgcattcgtgctggtattactgacgctggaagacgatacgcgccaggcgctaatcgtgacgccgctgtggtttatcgcgttgggtctgggctggctgttgataggtaagaaacggatggcgggaatgcgttaattgttttgcccggtggcgctggcgcttaccgggcttacagcgtaacgttgatttggaggccggataaggcgccgtttacagccgccatccggcaaaatgcccggctggcgattattccccggccagcgcgcgtgggaacagcacgttattctccaggctgatgtgctccatcagatcatcaatcatctcattaatgccgttatacatcgctttccaggtggtgcaggcttctggcggcggcgttacatttttggtgacgtgtttgatgacgtctaccagctctcccgcctcgtcatgctcgctttccattacgcttatcgggcccgttgcctggcgacccataccctgtttgatcatggggaacaggatctgttcttctttcatcatatggctggaaagctcttcatgcagcgcggtgagatattttgtcaggccgcgtgggacgtttggcttatccgcgtggacgcgttccactttggttgcctgcagaataagctccggcagttgttcgcgatgtcggtcatgatagcgaacaacgatatggtcaataatgtccgccagcggaacggcgcgccagtctttttcgatgggctgttcagccaactgcgccagttgcgcttctatgatgtcaatatcgacgtcgtgacgcgcggcggcgcgcgccagcgtctgttttccgccgcagcagtaatccatatcgtactggcgaaacagcgccgatgcgcggggaatagagagcgccagttcgcctaaaggttgatcgcgataagccatagccgttacctcatttgcaataatataagttgtattttaaatgcatctttaaggcgaagctataactctttcggggtgcgtataatttaagcgagtatgaaattagcgttccgtgaccggaacgacggtcgctttttccggtttcgctctcacggcaatgaccacgcccgccaccaggagcgcaatgccgcttaacgtcaggaatggcgggatttcctggcgcagaatgaaggtatagagcagtcccgccaacgtctcaaaaacaatcagcggccctaaaataacggttggcaatttttggctggcgatattccagcacagcgcgcccacccaggaacacagcaccgcgatggcgatcatcagaccgataaacagcgcgggatgcgggccaaagggcagggtaaacagcggtttctggatactcagccacagacagaccgccgcatagccgattaacgagaccggcagcgtaaccagcgcctgcgccgttgcccacatcatgggatgtttgtcgggattttcccgcagccagcgggcgttgcgcagcgcataccatgcccagcacgctacggaaatcagcgccagcacaatgcctgaaccatagcgccagccgctaacatcggacaatccctggctaagttcagcaatattgacgcacagcaggccaaaaccgataagcgccagcgcgggcgctaaacgccgccaggataatctgccgtctcgttggctatagagaacgttagcgaaaagcggaatgacgaccggcaatgtcccgatgatcatcgtcgacaccggcgcgccggttcgctgaatggcgctggcgaggcaggcgtaatagattacattgcccatcagggtcagcgacagggcggtggaccagtctttgcgcgttaactggcgtaaccgcgtgcggcctaaccaggcaatcggcagggcaatcagccccagcgccagatagcgtcccattgactgtaagagggccgggtaatccggcacgattaacgggccgacgaaaatcaatccccacattagccctgccagcagggcgtatagcacgccgctaatcatcagattctcctcataaaccgttccgtcattatcagagaaggtctatgaggatgccacataaattaactaaattttaacatttacagtacggagcgaaggctttctgtgagcgtcgtcgtcgggcgaccgatgagtttacgcagcgtatggctgtcatcaaacaggccgcctttcgccgcgccagcgtcagaattggccaacatatccgccagtccgtcaggcaggcctgcgcctttcagcgcggcggcaaaatcgacttcgctcaggttctggtagacgattttttttccgctttgatgagtaagttcatccgccaactggcttaatgtccaggcgtcatcacccgccagttcgtagacattcccggcgtgaccctcttcacggatgacgcgcgcggcggcggcggcatagtcagcgcgcattgcggaggcgattttcccttctcccgccgcgccaataaagacgccatgcttcagcgcggcagggacgctcgccaggtagttttccgtataccagccgttacgtaatagcgtgtgaggaatacctgactcagccagcatcttttccgtttcaatatgttcatcggcgagcgccagcggcgatttatccgcatgtagcaggctggtataggcgatgaatttcaccttcgcggcaatggcggcctgaataacgttgcggtgctgcgcggtgcgttgtcccacttcgctggatgatataagcagcagtttatcaacgccctgtaaggcggtggtcagcgcggcttcgttagcgtaatccgcctggcgaacggcaatcccgcgctgactgagcggggcggcttttttcgggttacggacgatcgcgacgaggtggctggcgggcgtcgtttttagcaggttttcaataacgtgttggcccagttggcccgttgcgccagtgatagcaatcatggtgaactcctcagtgttggtcttgtgttttattacgctaccacctaaacttacttttagtaagtacgtacaaaaaggtaagtatcaatgcgcgctcatactctttcccggcagttgcgtgaaggcaatctctttgctgaacagtgcccgtcccgtgaggtgttaaaacatgtcaccagtcgctggggcgtactgattctggtggcgttacgcgacggtacacaccgttttagcgacctgcgccgcaagatgggaggcgtgagtgaaaagatgctggcgcagtcgttacaggcgcttgaacaggacggatttcttaaccgggtgtcatatccagttgttccgccgcatgtggagtacagcctgacgccgcttggcgagcaggtgagtgataaagtcgccgcgctggcggactggatagaactgaatttgccgcaggtattggcgcagcgggaacgtttatcagatggcggctagcgctttattcggcctgccagtcaggccgaataaacgcagcgccatacgggacacacgttacttgcttaaatccacctgataaatggcaaaaccgatatcatcgacggcaaccttcttcatcggatactgccctttcgctttaatgaaggcagcggctttatcgcctggcgatgtttcaaagcggatatccagcgccgtatcgctgtggattggcgccagacgccagttattatccgccgccggatggatttcgcccgcgcgttttgactctgcgccaatccatgccgccagcacggcgcgattttcatccggagacgcaaaggcgatatggctgtcgcccgtgccggcaaacttgccgccgtaagcgcgatagttattcgtggcgaccaggaacgtagcgttcgggtcgacaggcttaccgttaaaggtcaggtttttaatacgttccgcctgcggattcaccatctggcattcgccatcatagcgggcgggctgtgacacatcgatttgataattcacgccgtcaatgacatcgaaattataggtgcgaaagccatcccaattgatcaacgattgcggtttgttgctgtgaatatcaatctgattaaattgtccggcagaacattccagccactcttttacctccttgccgctggctttcaccaccaccagcgtattcggatagagataaagatcggcggcgttacggaaggtcaactggcctttttccacctcgacaaagctggcaggatcgttcttacgcccgccaactttaaacggcgcggcggcggacagcaccggcagtttcgccagatccggatcgccctgaataaagtgttccacatacgctttttgcgcgttattcaccacctgtacggtaggatcgtcctgcaccagagcaagataactgtacatattatcggcggatttaccgatgggcttgctgacaaactcgcgggtggcatcgtgatcggctttcagaataccgaccagcttactgtcttccgccgccagcgactttttagcggcggcgtcatagataggccgcgcttccgctttcgcctgcgtaacctgccatttgccgctgtcgttattgagcaccagatcgaccactcccagatggtcgccccacatgccaggcattaccgcaggaatgccgttaagcgtacctttggcgatatccgcgcctttgatgtcggcaaaatctttaccggggaagacggcgtgagcgtggccaaacataatcgcgtcgacgccaggaacttcgctgaggtaataaaccgagttttccgccatgctgtggtacggatcggcagaaagacctgaatgagcaatgactaccacgatatcagcgcctttctcgcgcatttcgggcacatatttccgggcggtttccgtaatgtcattgacggtaactttgccgctcaggttcgctttatcccaaatcatgatttgcggcggaacaaagccgatatagccgattttcagagtttgcgggttgccgtctttatcaataacgctcgtctctttaatcagataaggcgtaaagagcggcttttgggttttaacgtcgataatattggcgttaacataagggaatttcgcgccagccagcgcgttatgcagatagtccagaccataattaaactcatggttgccgaggtttccaaccgcgtaatccagagtgttgagcgctttatagaccgggtgaacgtcaccgtctttgagcccttttgccgccatataatcgcccagagggctcccctgaatcaggtcgccgttatccaccagcacgctgtttttgacttcatttcgggcggcatgaatcaaacttgcggtacgtaccaatccgaatttttcggttgcggtatccttgtaataatcgaaatccatcatgttgctatgtaaatcagtagtttccatgatacggagatcgacggtggccgcattcacgctggcggcgatcagcgtagccagaagcgttgcactaaacttaatcatcagaggcaccttttaagagcgcaatagaaaagccggatagtgaaaaatagcgatgacaaacagtgaaacccgatatcgttccaaccgtcgccagaagaaggcgaaaccgccccatccggccgattttttgcgagtgttcacagaaaggtgaatcatgccatgaaagctattatcaaaaccgctgacggtatcacagttggcggaacccttaacgatcgggtataagtaaaacaacgagttaacgcccccgtcataaagaggtggagaatgttagaacaagtatgccagcttgcacggaacgcgggcgatgccattatgcaggtttatgatggagccaaaccgatggagtacgcccgcaagcaggacgattctccagtcactgcggcggatatcgccgcacataccgtgattctcgaagggttacgcacgctcacgccggatattccggtgctttcagaagaggatccgcccgcctgggaagtgcgccagcactggcagcgttactggctggtcgatccgctcgacggcaccaaggagttcatcaagcgcaatggcgaattcacggtcaatatcgcgctgattgagcagggcaagccggtgttgggcgtggtctatgcgccggtgctgaaagtgatgtactacgcggcggaaggtaaggcctggaaagaggagtgcggggtgcgtaagcagattcaggtccgggatgcccgcccgccgctggtggtgattagccgttcgcatacggatgatgaactcaccgaatatctccaacagcttggcgaacatcagacaacctctattggttcctcgctgaaattctgccttgtggcggaaggccaggcgcagctttaccccagatttgggccgaccagcgtctgggacactgccgcaggtcatgccattgccgttgcagccggggcgcacgttcacgactggcagggaaaaacgctggactatacccctcgtgaatcgttccttaaccccggcttccgggtgactatttactgaggagcttatgcagcaggtcgaccacctgctgtacctcttgctgggttaacgcgccatctttcacccattgaacccgaccgtctttgtcaagcacgatgacggcggacccctcttcttttaattgccaggcgttacgcgccacgccattgctgtcgacaataaattgcgaccacgggtagagctttttattactttctatactgctacgcacgaacataccggagcctgggatcgcatcatcggtgttcacaattgtggtcgtctggtatctgtcatgcgggagcttggctgatttaatcgcttcaatcagcgtggcgtttttttccttcgctgacgttcgacccgcaatgtgcagcaggacgcgcacttttcccgccagctgcgcgctattccagtttttataactaaactcatctttattcaacgtcagttcgccacggtcggcaatgcctaccggcggcacccgttggttaacttcaaggttatgcgcacaagccattatggggagtagcagacacgacatcgccagaattttacgtaaggtcatggtcattccttctttatttttttgcaggtgatccgaccactttgggccgatagttaatcatatgtgcgattgatgctttttcccgcaaaggggatgccagtttgcgggcgggcgcacacttcctgtgaaaaatgaaggcatatactgagaaaaatgagctgatgtttagataattctgaataactgtaatcaaaaggtaaatatacttatgcacactggaaacgacgtagatatggtctatagtcatatggcattaaaatttgcgccttaaaactgttgggccgattgtggcatcgcaagggcgtaatactctgcaggagacaacaatgaaaattttccaacgctacaacccgctacaggtggcgaagtacgtgaagatcctgttccgtggacggttatatatcaaggatgttggcgcttttgagttcgataagggtaagattcttatcccaaaagtgagagacaagcagcacttgtctgtgatgtctgaagttaaccgtcaggttatgcgtctgcaaactgagatggcgtaaccaaaagtgctatgcagtaggttaaaaaagtaaaaaaaaacggctcctgaatcaggagccgttgatgtttctggcaaacggatttcaggccgcgctgtcttctttaccttgcgcatcgggcagtttcggcgccggtacgttgcttttattgtcgagacgcgtcaccagcaactgatcgatacggtagttgtcgatatccaccacttcaaatttgtagccggaaaacttcaccgaatcagtacgttttgggatcttgcgcagcataaacatcataaagccgccaatggtttcatagttgccggattgcggaaactcatcgatatccagcacgcgcatgacgtcgtcaatcggcgtgccgccgtcaaccagccaggaattttcatcgcgcgccacaatttgctcttccagtccctggccgaccaggtcacccattagcgtggtcatcacatcgttcagcgtaatgataccgacgaccagagcgtattcattcataatgaccgcgaaatcttcgcccgccgttttgaaactttccagcgcctcagaaagggtcagcgtatccggcacaatcaaggtattgcgaatttgcacgccgctattcagcgccatactttggttagccagcacgcgattcagcagatctttggagtctacatagccgatgatgtggtcgatatcttcattacacaccaaaaattttgagtgcggatgttcggcgacctttttcttcaggctttgttcgtcttcgtgcagatcaaaccagatgatactttcgcgcgacgtcatagaagacggtacggtgcgagattcaagttcaaacacattttcaattagttcgtgctcttgcttgcgcaagacgcccgccagcgcgccggcttccaccactgcgtaaatatcatcagaagtaatgtcgtctttccgcaccattggaattttgaacaggcggaagatgttgtttgccatgccgttaaacagccacaccagcgggcgaaaaacgaacaggcagaagcgcatcgggttgatgatacgcaaagccacagcttctggcgcaatcataccgatgcgtttcggggttaaatccgcgaacaggataaacagccccgtcaccagcgagaaagagagaataaagctcagctgctcggagagttctggcgacatatagtgcgagaagagggcggaaaaggcgggcgaaaatgccgcatcgccgacgataccgccaagaatagcgacggcgttcaggccaatttgcacaacggtgaaaaacatgccgggattttcctgcattttcaatacgcgttgtgcgttgatactgccttcatcagctaataacttaagtttaatcttacgtgatgcggcaagcgagatctcggagatggagaagaacgcacttacagcgatcaggcagaatataatgaatatactgtttaacatatcttatccggcgaaacgccagatcctcggaagggaagtttataaatccgtgtggtaacgtttaatgaaaaccggctcgtagcagtgagccgataagttcagggctagtatagcgtaagctactgtaaagtcgccagagggttcattttcaactccgacaagttccccctacgccagcgtcgtcacgcgtcaggcggcaggcaaacgccgatcccgccaatcccgcagtaaccatatggatttttgtgcagatactgttggtgttcatcttcggcgtagtaaaacggcgtcgcatgggcgatttccgtggtaatagggcgatggtctccggcggcggtcattgccgactgaaagcgctcgcgactggcgtgagcggcggcattctgttccggcgttaagggataaatcgcagaacggtattgcgtaccgtgatcgttaccttgttgcatcccctgcgtcggatcgtgattttcccagaaggtctgtaaaagctgctcataactgataacggcaggatcgtacactatccgtaccgcttcggcatgaccggtctgcccggagcagacttcccggtaggttggattaggcgtgtaaccgcctgcataccctgccgcggtgctatatacgccgggcaattgccagaataaacgttctacgccccagaaacagcccatagcgaagtaggcgatctccatcccggcagggacattggtcatagagtgttcatttaccgcatgcagagtggcgatcggcatcggggtgttgcgtcctggtaacgcatctgcttgagtaaccagatgttttttatcaaataaactcatgagctattctcccgaaagcgttaattggcgttaaggttgtaacgagacgcatctttgcacacaataacaacattaatgtatctggatttaaccataagaaatatttgggcagtcgtctgcttttcaatcgaaattgttgattttatgttaagccgcggagcggtagtgtgattttttccaggggtgggaataggggatattcaggagaaaatgtgccacatatccgtcagttatgttgggttagcttactgtgcctgagcagttctgcggtagccgcaaatgttcgtctgaaagtcgaagggctatccggagagctggaaaaaaacgttcgcgcacagctctctacgattcagagcgatgaggtgacgccggatcggcgctttcgcgcccgagttgatgatgcgattcgcgaagggcttaaagcgttaggctattacgaacccactatcaaattcgacttgcttccaccgcctgcgaaaggacggcaggtattaatcgccagggttacgcccggccagccggtgttgattggcggtacagaagtcattttacgcggcggcgcgcgcacggacaaagattatctggccttactgaaaacgcgtccggcaatcggcacggtgctgaaccagggagactatgacaattttaaaaagtcgttaaccagcgtgtcgctacgtaaaggctatttcgacagcgaattcattaaaagtcagttgggaattgctctgggccgccatcaggcgttttgggatattgattatgatagcggtgagcgctatcgcttcggacctgtcaccttcgaaggttcgcagattcgtgatgaatatttacaaaatctgttgccgtttaaagagggtgatgagtacgaatcgaaagatttggcggaactaaaccgccgactttccgctaccggatggtttaattctgtcgtggtggcgccggaatttgagaaatcgcgtaaaacaaaaattctgccgttaaaaggcgtggtatcgccgcgaaccgaaaacacgattgaaaccggggtggggtactccaccgacgtcgggccgcgcgtgaaagcgtcgtggaaaaaaccgtggatgaactcttacggtcatagcctgaccaccagcaccagtatttctgcgccggaacaggtgctggattttagttataaaatgccgctgctgaaaaacccgctggagcaatactatctggtacagggcggttttaaacgtaccgatttgaatgatacggagcaggactcgaccacgcttgccgtgtcgcgttactgggacctttccagtggttggcagcgggcgattaatctgcgctggagtttcgaccactttacccaggggaacgtcaccaataccaccatgctgttctacccgggcgtgatgatcagccgaacccgctcgcgagggggactgatgccaacctggggcgattcgcagcgctattcagtagactattcgaatacggcctggggctccgacgtggatttctccgtgctgcaggcgcaaaacgtctggattcggactttgtacgatcgccaccgttttgtgatgcgcgccaatttgggctggatagaaaccggtgatttcgacaaagttccgccggatttacgtttcttcgccgggggcgaccgcagtattcgcggctataaatacaaatctatttcgcctaaagatagcgacggcaatcttaaaggcgcctcaaaactggcaaccggatcgctggagtaccagtataacgtcaccggtaaatggtggggggcagtgtttgtcgatagcggcgaggcggtgagtgatattcgccgtagcgatttcaaaaccgggaccggggtcggcgtgcgctgggcgtcgccggttgggcctgtcaaactcgattttgccgtaccggtcggcgacaaagacgaacacggtttacagttttatatcggtctggggcctgaattatgagtttatggaagaaaataagcctcggcgtgttgattttcattgtggtgttactggcgagcgttgcgtttctggtcgggacgacgacggggctgcatctggtattcagtgcggcgaaccgctgggtgccggggctggagattgggcaggtcaccggcggctggcgggacttatcgttaaaaaatatccgctatgagcagccgggcgttgcggtgaatgcgggcgaaattcatctggccatcgggcttgattgcctgtggcgcagtagcctgtgcgtcaatgatctggcgctaaaagatattaatgtcgctatcgacagcaaaaaaatgccgccctccgaaccggcgcaagaagaggaagaaagcgggccgctgaacctctccacgccctggcccatcacgctgtcgcgcgtggcgttgaataacatcaatatcaagattgatgacactaccgtttcggtgttggattttacctccgggctggcatggcaggagaaaaacctgaccctgaaaccgacgcggcttcagggactgctgatcgcgctgccgaaggtcgctgacgtggcgcaggaagaggtggttgaacccaaaatcgagaaacctcaaccggatgaaaagccgcttggcgaaacgctaaaagatctgtttgcaaaaccggtaatgccggagatgaccgatgttcacctgccgctcaatctgaatatcgagtcatttcgcggcgagcagctacgcatcaccggcgataccgatctgacggtgcgcacgatgctgcttaaagtcagcagtatcgacggtaatatgaagctggatactctggatatcgacgccaaccagggcacggtgaaagcctccggtacggcgcagctcgccaataactggccggttgatattacgctcaacagtacgctgaatatcgatccgctaaagggtgaaaagataaaactcaaggtcggcggcgcgttacgcgaacaactggaggtcggggtgaacctttccgggccgatggatgtcgcgcttcgcgcccagacgcggctggcggaggccggtttaccgctcaatcttgaagtcgtcagccaacgcattgcctggccattgacgggtgatacccagtttcaggctgacgatctgaagctcaaactgagcggtaagatgaccgactatacgttgtcgatgcgaaccgccgtgaaaggacaagatattccgccggcgaccatcacgctggatgccaaagggaatgagcggcagattaatctcgataaactcaccgtcgccgctctggagggaaaaaccgaactgaaagcgctggtggactggcagcaggcgattagctggcgtggcgaactgacgctgaatggcatcaataccgctaaagagattccggactggcccgcgaagcttaacggcgtcatgaaaaccaaaggcagcctctacggcggcacctggcagatggatgtcccggagctcaagctgaccggcaatgtgaagcagaacagcgttaacgttaacgggacgctaaagggcaacagctacatgcagtggacgatcccggggctgcactttgcgctgggcccaaacagcgccgatataaaaggcgagcttggcgttaaggagctgaatcttgacgccgccatcgatgcgccagggctggataatgcgctgccaggactgggcggcatggcaaaaggaatcgttaaagtccgcggtacggtagaagcgccgcagctgttggcggatatcaccgcccgcggcttgcgctggcaggagctgtctgtcgcccaggcgcgcattgagggcgatattaaatccaccgatcagatagcgggccatctcaacgttcgcgtagagcggatttcgcagcccgacgttaatatcaatctggtgacgcttgacgccaaaggcagcgagaagcagcatcagctacagctccgtgttcagggagaaccggtatccggtcaactctccctgacaggcagcttcgatcgcgaggcggcgcgctggaaagggacgttaagcgacacccgtttccagacgccagtggggccatggtcgttgacccgcgcgattgcgctggactaccgtaataaagaacagaaaatcagtatcgggccgcattgttggctgaacccgaacgccgagctgtgcatcccgcaaaccattgatgcgggcgccgcaggacgggcggtggtcaatctcaaccgctttgatctggcgatgctgaagccatttatgcctgataccactcaggccagtgggatctttagcgggaaagcggatgtgtcgtgggacaccacccaggagggattgccgcaggggaaggtcacgctttccggtcgtaatgtgaaggtcacgcagaccgtcaatgacgcgccgttaccggtcgcgtttgagacgctgaacctcagcgccgatctgcacaataatcgcgccgagctgggatggctgattcgcctgacgaacaatggtcaattcgatggccaggtgcaggtaaccgatcctcaggggcggcgcaatctcggcggtaacgtcaacatgcgcaatctcaatctggcgatggtcaaccctgtcttttcgcgcggcgaaaaagcggcgggaatgttaaacgccaggctacgtctgggcggcgatgtgcaaagcccgcagttgtttggtcagttgcagcttagcgcgctggatattgacggtaactttatgccgtttgagatgcagccgagccagctcaccatgaactttagcggtacgcgttcgacgctcgccggtatcgtgcgaacacaacaagggcaaattaacctgaacggcaacgccgactggagtcagattgacaactggcgcgcgcgggtgacggcgaaaggcagccgggtgcggattaccgttccgccgatggtgcgcctggatgtctcgccggatgtggtctttgacgcgacgccttcgctgttcacgttggatgggcgtgtggacgttccgtgggcgcgaattgtggtgcacgacctgccggagagcgcggtcggcgtctccagcgatgtggttatgctcaacaatgacctgcaaccagaaacgccgcagacagcgtctattcccatcaacagtaatctgacggtccacgtcggcaacaacgtgcgcatcgacgccttcgggcttaaagcgcgtttgaccggcgatttgaaagtcgcgcaggataagcaggggctggggctaaatggtcaaatcaatattcctgacggccgattccgcgcctacggccaggacctgcttgtccgtaaaggcgagctgctgttctccggcccgccggatcagccgctgctcaatatcgaagcgatccgtaaccctgacgccaccgaagacgatgttattgcgggcgtgcgcgtcacaggcacagctgatgaacccaaagcggaaatcttctccgatccggcgatgccgcaggctgaagcgctttcttatctgctgcgtgggcaggggttggacagcaatcagagtgatagcgcagcgatgacctccatgcttattggcctgggggttgcgcaaagtggtcaggttgtgggtaaaatcggagagacattcggtgtaagtaatctggcgctggacacgcaaggggtgggcgattcgtcccaggttgtggtcagcggctatgtactgccgggtctacaggtgaagtatggtgtagggatatttgactctctggcgacgctcacgttacgttatcgcctgatgcctaagctatatctggaagcagtgtctggcgtagatcaggcacttgatttgctctatcagtttgagttttagcaatgcgaatatttgtctatggcagtttacgacagaaacaaggcaacagtcactggatgaccaatgcccaattgcttggcgattaccgtatcgatgactaccagttgtatagtctgggccactatccaggcgcagttccgggaaacggagcggtatacggtgaagtttatcgaattgataacgccacgctggccgaacttgatgctttgcgcaccaggggcggtgaatacgcacgccagttaatccagacgccttacggcagcgcatggatgtatgtatatcaacgtcctgttgatgggttaactctgattgaaagcggtgactggttagacagaaaccagccctgaactgaacacgccaccctcgggtggcgttgttttttacattctggctgatggcgctagcgccgggcatggtgagctcttattctgccgtagatcaataatgacgcgccgcccaggataacaatgcatccgagaaccataaatccctgcatgtagctgccggttgtccggtaaaaatagccgaccataaggcctgccaacgtaccgccgccgccggcgccgatgccattaataataccggaggctgggccaatcgcatggggtttaacgttcgactggataatcgaccagatattgggggtaaagctggcggcataataacccatcgccagggtaatgagcgtgattttaaagcccggcgcatcgacaaatggcaggagaaataacatcacgccggggattagtaggcccagtgaagcaataagtacacgtttttgtgtcttatcactgatccatgagatagggattgccagtataaccgcagtcagataaggcagagaactgaccaatgctttactgaatccggtatagccgagagaattgacaaccatgggtatccataacgtaattccccagaacaacatcccttgagtgatgtaggtaaaaataaggagtaggaagggggttccgcccagcgattccagggtaagtttagttttctctgttggcgccggcgcacgataataaggcgcttcttcctgttttttcagcattgttatataaagtggaaccacaacaacaatgccgatcacaccagtgataataaaaacatttcgccaaccgaaggcagcatccagcggggacaaaatcataaatcccaggcctaatgccaggaactgtccataatactggataatgctgttcgcctgcgtccgttctttgtctgaaaaccagtcgctggcgaagcgggactgctgcggccaataaatgccttcggtaatgccaagcaccagccgacaaatcaaaataacgtacactgacgaggtaaatccgacaaaaacggtcgcaatcgaccagattagcaccatcagaatgactatttttttcggatcgtatcgctgggtaaatacgccgccaaaaatatttgaaaaggcatagccaataagaaatatggttaatacaatgctggccgttgcgccatcaatattcaggtcgtgtgtaatcgtaggtaacgtaacggaaagattagaacggtcaagataagcaacaaaaaggccgaacattaatgtcgcgccgatccgtagccatttttgcattgaggtcatttttcaactccgtttggccgcgcgccaaaatcaatttgacgaaataatatctcaccggattttatggtcatttgtggtaccagcacatgcgtccccgtgagcgtttcaccatgaatatcggcaaattcaacatgcctgttttttaatttaaagatggcgatatcggcaaatgccccaggggccagcgtaccaatttctgctgccatacccattaaaactgctggggtatgggtacaggcgttaatgacatcggtaagcgcgacgccgagtgctaaatatttcgataaaatccatggtaaggcgtaaacaggccaggcgagtttagtgatggttgagagatcgctactgatgatatccggaagaaagccattggcgatggcccggcgtgccgtgttcattgaaaaatggctgtgaccattggcggcatcaaatataacgcctctttcccttgcctgacggacttcggctaagaccacgccttcatcagtaagaatggtgctacctttgccgtgaaacgcatgagcgataatatcgcctcggcgtagcaaggagacaagttctttcatgggaacgacgggatgagtcgagtgtattgccacgggacactttaaatcgttggcaatacgaagggattcagtcagcggttttaagccatattcagcaatgtcctcagtctgaaccttgagttttaatccctgaagaacgttgcgatactgacgaaacagcgcgtggatcttattttcatcaatattgtcaggatcataattttcttgtgaccaggtttggcccggcggcgacacggtcaaaaacgctttgattcgaactttgctggcgcaaatcaccgttcggtagaaggcatcaaagtttgccgtaccggcagaacctgcatccacgacggtggtgacgccattcggcggcatgtacatatcaggcctgacgccgccttccgtcgcgtcataaaaaacatgcgcgtgataatcgataagaccgggagtaacgatcatgccgtcggcatggataatccgggtctccgaagttacaggatatttatcggcatcaacgataatatcgttaatgatgcgtaaattgttaatctcattaatattacgagcgggatcgatgatatgtccaccggtaattaatatatcatttttcatcataatctcttaaaatagtaaataattatggcagcccttaaaaatatattaaaaagtgtgttttgagcggatgttatgttggattaaaaatacggttattggtagggagagcttaggataccttattaaaaaggtaatcgggcttatgcactaaataagactttagcgcttgctaatatttagggcgtaagtccatgggagtctgggagcattcacaaaacaattattatcttaagctttttagagaaaccgtgagcgtattcaaccctttttaataaaaaatcaggtaaagtattattcattccgtgaatgttaaattaataatgataaaaactgtgttctattcattagccaataaaaaggccctcattactatgagagcctttatcttgacgcttatgtaaaagcgaacttatttcttcgctgcgcgctcgaaggaggcaacgatttccgctttagccgcttcggcgttgtcccaaccgtcaactttcacccatttgcctttttcgagatctttataatgctcgaagaaatgagtgatctgcgctttcagcagttccggcagatcgttcacatctttaatgtgatcgtactctttgctcagtttggtgtgcggtacggcaaccagtttcgcatcttcaccggattcgtcggtcattttcagtacgccaaccggacggcaacggatgacggcgcctggctgcagcgggtacggcgtcgggaccagaacgtctaccgggtcgccgtccagagacagggtatggttgatgtaaccgtagttgcacggatagaacatcgctgtggacatgaagcggtcaacgaacagcgcgccgctctctttgtcaacttcgtatttgatcggatctgcgttagccgggatctcgataacgacgtagatatcttccggcagttctttacccgccgggacgttgagtaagctcatgtctgtttcctttgaatttatgacaaacaagtggcgagtattatagccaactcacgccgaaagtcttcgcttgttttcgtttccgcctcatctggcgcgtcgttgcggagcataaacgacaaaggttaagaaccggaaaaatcacgggcctgataaggcaacgccgccatcggacatgttattgcccaatggcggcttcatgcgttattccgcatggtggtaaaaattacgcgtccgggtattcgcggataaagcgttccacatcgtcaaccatatggcggttgccgacgaagaacgagcggcgctggtgcaggctttccggaatgatatccagaatacgttctttaccatcgcttgctttgccgccggcctgttccgcgaggaacgccatcgggttgcattcatacagcagacgcagtttcccctgcggatggctggcggtgctggggtagagatagatgccgcctttcagcaggttgcggtggaaatcggccaccagagagccaatgtaacgtgaggtataagggcgacttgttgaactatcctcttcctggcagaatttgatgtacttcttcacgccattcgggaatttaatgtagttaccttcgttaatggagtaggttttacccttttccgggaaacgcatacgttcctggcacagacagaacacgcccaacgacggatcgtaggtgaaagcgtgtacgccgcagccggtggtgtaaaccagcatggtggacgagccatacacgacatatcccgcagcgacctgtttgttgccgggttgcaggaaatcttcttcggtgaccggcgtgccgacgggcgtcacgcggcgataaatcgagaaaatcgtaccgacagagacgttaacgtcgatgttagaagagccatccagagggtccatcagcaccacatatttcgcgtgttcgcagccttcaaagacgacaatttcgtcctcttcttccgatgcgatgcccgctacaatatcgcgcgcttttagtgcagctttcagtttctcgttcgcgaacagatcgagtttctgctgaacctcgccctgtacgttctcagcaccgctggcacccaggatatcgaccagaccggccttattgatatcgcggtggatgatcttggcgcccaattttattgccgacagcaaagcagtgagctcaccggtagcctgagagaactcgtgctgcttttcgacaataaattcacctaacgttttcataacactttccctgcaattgattggagtaaagcgaccgtaacaatcttaacaaacatttcagatgatgcgctcaggtgaatcgcgccagcaaagtacagatttacctgaaatgcgtttctcacttgccagacatgtgcgtaaaatggctcgcagataaaaaaaggatagtgacgtatgcgcattcatattttgggaatttgtggcactttcatgggggggctggcgatgctggctcgctcgcttggtcatgaagtaacgggttcggacgccaatgtgtatccgccgatgagtaccttacttgagaagcaaggcattgatctgatccagggttatgacgccagccagctcgatccgcagccggatctggtgattatcggcaatgcgatgacgcgcgggaatccgtgcgtggaagcggtgctggaaaaaaacattccctttatgtctggtccacagtggctgcacgactttgtgttgcgcgaccgctgggtactggcggtcgccggtacccacggcaaaaccacgaccgcaggcatggcgacctggatactggaagcgtgcgggtacaaaccgggctttgtgattggcggcgtaccgggcaactttgaggtttccgcgcgcctgggagagagcccgttctttgttatcgaagcggatgagtacgactgcgcgttctttgataaacgttctaaatttgtgcattactgcccgcggacgctgatcctcaacaaccttgagtttgatcatgccgacatcttcgacgatctgaaagcgatccagaagcagttccaccatctggtgcgcatcgtgccggggcaggggcgcatcatctggccggaaaacgacatcaacctgaaacagaccatggcgctgggctgctggagcgagcaggagctggtgggcgagcagggacactggcaggcgaagaagctgactacggatgcttccgagtgggaagtgtggctggacggcgaaaaagtcggcgatgtgaaatggggcctggtcggcgaacataacatgcacaacggtctgatggcgattgccgccgcgcgccacgtgggcgtcgcgcccgcagaagcggccagcgcgctggggtcatttattaacgcccgccgccgtctggagctacgcggcgaagcgaacggcgtgacggtgtatgacgattttgctcaccacccgacggcaattctggccacgctggcggcgctgcgcggtaaagtgggcggcaccgcgcgcattatcgcagtgctggagccgcgttctaacacgatgaagatggggttatgcaaggatgacctggcgccgtcgttagggcgtgcggatgaagtgttcctgctgcagccgccgcatattccgtggcaagtggcggaagtcgctgaagcctgcgtacagcctgctcactggagtggcgatgtcgatacgctggcggaaatggtggtgaaaaccgcacagcctggcgatcacatcctggtgatgagcaacggcggtttcggcggcatccatcagaaattgctggatgggctggcgaaaaaagctcagaacgtaacagcgtattaaatgactatgcggtcagccagccttgtggctggctgttttatatggggcatcttgccatcgaaagcgcattccgctcgccgggagacgttaaagcaatactgaaaaatcatttgccgctcagtattgaaaaagagtagacgcatatccttaaagtaatcagtgtaatacactaagagtgttccgccggttgccgtatgcgggacgaaaagagccagttcgcaataacagatgaaggtttcgtgatttataaacgtcatcttctgcctttcaacgtttgcgatgccgcctggctgcgggcatcgtccagtcataacaatgctgatcctgtcgcatttatgcggtcagattcagattgctcagaacccagcccgccagcaaattctgtactgaaggtaaccacagcgcaatttgaatgttgttaactgtatgttcagttcatttgtgctaatatggttatttacgaaattttcgttctattagagtatcatgcatgtctaaacatcaaactcaactttccttactgcaggatgatatccgcagtcgctatgacagccttagcaaacgtcttaaacaagttgctcagtatattctggataacagtaatagcgttgcttttgacacggtagcttccatcgcgcaacatgccgatgttcccccttcgacactgattcgttttgctaatgcgtttggttttagcggatttaatgaaatgaaacaggtatttcgccagcacctgatggaggaaacagtaagctataccgagcgggcgcgtctgttcagacagaaaaatgcggatgaaggggaacctaccccggaaaagccgggtgaaattctgaagctattttcaatggtgaatgcacaggtattacaacaattaccggtgcagattaaaaatgagcagttggatgcggcggtaaatctgttagcgaaagccgacaatatttatgtgattggattacgtcgttcgtttagcgtggccagttatttaacctacgcattgcgtcatctggagagacgggcatttttaattgacggtattggcggaatgttctctgaacagctaagtatggtcagccccgacgatgtcgttattgccatcagctactcgccttacgcgcaggaagtggtggaattagtcgagcttggcgcgaaacgcggtgcgcaccatattgcgataaccgatagccaggtcagcccgctggcagcgttcagtgaagtctgttttgtggtacgtgaagcgcaggtcgatggtttccgttctcaggtcgcgtccatgtgtctggcgcaaacgttagcggtttcactggcgctggcgacggagtaaaaaaacaagccgatgatcgtatttagcgatcatcggcattgtggtgaaacttaatcagaataacgttcggtttgaattggctgcagtttttttctgcgttttgctaacactacgctctccattttctccagcgaaatgccttttgtttccggcaggtaacggcagataaagaagtaactgaagatgcagcagatggcaaatatccacattggaaatgcgccgtggaaatgcgaaagtaaatacgggttttcattaatcatcgggaagaattgcgaaactaaaaagtttgccatccacataaatccgaccgaaatactcattccctgcgacctcatccggttagggaatatttcagaaataagcacccatgcgcccacgccccaggaaagcgcgtagaaaatcataaagaacagcataccgaatagcgcgaaataaccggttgcctggctgtacagcgcccatgaggtgagcaacaagccgatgatgctgccgatagtgcctttacgcatcagcgacaaacgccccatcttatccataatcattgcgccaataatggaaccgataagctgaatcacgccgatccagattgtctggaacagggcctcctgggcgctaccggtcacatccttaaggacgattggcgcgtaatacatcatgacgttaacccctgttacctgttgcagcatagcgatcatgcagcccaggatcaggatgaaacgcacgttcccgtcgcggtaattgagtttttgatgggcgtttagttggtcattttgcagtgaggtttttatatcggcaagaagatgtctggcatgttcttcgttggatattttggtcagtatttttagcgtctcctcctcgcgaccaatcatcatcatccagcggggagattccgggattaaaaagactaaaatacagaacaaaatgcagggaataatacccgcagcaaacatatagcgccagccaagttcaatgagccaggtatccgctgcaatcgatgctattttgtagttaacgtagaagatcagaatctgaccgaaaacgatagcgaactgctgcatacttaatgctctgccgcgcatgtttttcggtgagacttcagacatatacatcggtgatactgttgccgccaggccgactgccagtccaccgataatgcgataaatcacaaaatgggtgaacgtgtaggagagggaggtgcccactgcggaaatagtgaataacagcgctgaaaccatcaatgatttcttgcgtccaaaacgtttggataaatatccggcgctaaacgaaccaataacgcaccccaccacaacgcaggaaaccgcccagccggtctcagcaggagatagatgaaagtagctggtcagtgaaccaatcgcacctgaaataacagcagtatcgtagccaaataatattccgcccagtgcggcaatcgcgcagatgcgtaatatgtaacccgtattataacaactatctgatgtggacataggtagattatctccagaataaacttcatctatctgtttgaatttagtgaacaaatagacaaattcatcttatgtcggtcattgccgtagcgctgccgacgatcttatagctattgagaactctcgtttcacaacctatgttttaatttcaaaacgatcaataatgaaacttatgttttgttatgggtatcacatttcgaatttcataatcctggcgttttttatcgttaagatgctgcgttttacgcagtgctctcctctatcttgatgaagttacttgattttattgatttcgcgacagtacctgaactcaatttgtcaggggccgtactttttgttctttcctggaacatctccatttcgtgatcttttgcatggaatttttcttctaatgaatgcaaaaataaaatgaaaaatttcattggtgtgttgtttcctcaacaggcaagggagggattatgtctcagagaagtaagtacaattcggcctatgtgtacgtcctgtgttgtattgcggcgctggctggattgatgtttggttattcaacggcggtgattaccggagtggtattgcctttacagcagtattaccaactgacgccaaccgagaccggatgggccgtttccagtatcgtgattggttgtatcatcggcgcgctggtcggtggaaaaattgccgataaactggggcgtaaacctgcgcttctgatcattgcgatcatttttatcgcttcttccttaggggcggcgatgagtgaatcgttcatgatcttctccctttcccgcattgtgtgtggttttgcggttgggatggccggaacggcatccaccatgtatatgtctgaactggcgcctgctgaaattcgcggcaaagcgctgggcatttacaatatctccgtggtatctggccaggttatcgtgtttatagtcaactatctgatagcaaaaggaatgcctgctgatgtgctggtttcccagggctggaagactatgctttttgcccaagtggtaccctccattgcgatgttagcgattacgcttttcctacccgaatcaccggcatggtgcgcccgtaacaaccgcagcgaagctcgttcgataaaggtgcttacccggatctacagtggattaacggccacagatgtggccgctatttttgacagcatgaaagaaaccgtacgttcacaggacaacgtcgccgggggagaacgcaccaacctgaaaagctcgccggtgctccgctatattctgttggttggatgctgtatcgccgttttgcaacagttcacaggcgttaacgtaatgaactattatgcgccgctggtgttgcagaacagcagtaccgaagtggttatgttccagaccatttttatcgcggtatgtaatgtggtgggcagttttatcggcatgatcctgttcgaccgctatggccgtataccgattatgaaaattggtaccatcggctcaattgtcggcctgttgatcgcgtcatacggtttgtacacccacgatacaggctacattaccatctttggcatcctgttttttatgctgctgtttgccgtcagctggagcgttggcgcatgggtactgatttctgaggttttccctgaaaagataaaaggttttgggatggggctggcggtgagtctgatgtggatagccaacttcctcatctcactgttgttcccggtcataaatgataacgcctggctgcaggagaccttcggcggcgctttctcgatgtggatttttgtcgtctttaatttggtctgctatgtctttatttctcgttatgtgccggaaacaaaaggggtgccgctaacagaaattgaacggctggccgagaacaagctgcgtgaaattcaggggaaacgtcgcgatgtaatagcctgatacctctccaatattagcggagaatatccagagatattctccgctggttacacaacctttactccctccagcgagtgcgcacaggatataccctgttgaaacctccccagtgtttaccacctctacgtaactaattgatccataataatatcggcaaatagggtaagtcttcttctgcatcattattttattgcgtattcctggtgggggccgtgccgtaaatacgctatatacaaaacagggaaataatttaagagaaggcggatagcgatcttatgagcgtgtgtggcgcagagttgaataaaaaagccagccgcagaggacggctggcaaagtaccactcaacgaagtgttatcgcgggtagtctggtgagttaatccacgcgtggttctcttcccaggtgaaacgccattttcgtagcgggccggccatcacgttcagatagtagttatcgtaacccgcgatggtggcaaccgggtggtagcccttaggtactttcactacatcccggttatagaccgccatacattcatccaggctgcgatcgtcggtgtagacgcgctgtaagcagaatccctgaggtggattgaaacggtgatagtacgtctcttccagataggtctcctggccttcaactgccgtatcgtgcttgtgcgcgggccaggagctggtatcgccttcattagtgtacacttcaacgactagcaggctgtcggcgagctggctatcaggaaggatgttatgcaccaggcgctgattgcgcccttttccccgatgctctaccccgacctcttgtggcgagatcagacgtaccggaagctctccgaatcccggcgcgctgcatacggccagctcaaggtcggtttcggctgtcactttcgcctccgtatgatgggggaggtaaaccgaataagccggaatgcgttcaaacggactcatgcgctgaccaatccgatagaaaaaactgtcggcggccttaacgctggccagcccggcaaccagcaccagacagcgttcacgctcatcggacggcagggttatcgactctccagccttcaactgccagacatcaaaaccgacatactcccagcctgcattttgaggggaaatgtgttggatatttcccgactcagaggtacaggtactcagcaagttggccataatcttctcctccctgaaagcgtattaaccgagagtcggcatactgaactccgatacgatctgctgtccgttcggccaacgcgaggtaacggttttcatccgggtatagaagcgcacgccatccggcccatggacgttcagggcgccaaacaccgagcgcttccagccgccaaaagagtgaaatgccatcggaaccggaactggaatattaataccgaccatcccggcttcaaccgactgggcgaattcgcgcgcatagtgaccgttggtggtgaaaatcacgctgccgttgccgaattcatgggagtttaccgtgctaatggcggtggcataatccgggacgcgcacaattccgagaaccgggccaaaaatttcttcacgccagatggtcatctcaggcgtgacgttatcaaacagagtgccgccgacataaaagccttcaggatatcccgccacgctatagttgcggccatccatgaccagagttgctccctcgctcacccctttgtcgatgtaacccaacactttctgttgatgagcacgtgaaacaaccgggcccatttcattttcatctttgccgcgcagctctcccgggccgatacgtagcgccgcaatcagcggtttcaggcgttcgatcagacggtccgccgtttcatcgcccaccgcgaccactaccggcagcgccatacagcgttcgcccgcggaaccaaatgctccgcccataatggcgttgacggtggcgtccagatctgcatccggcatgacgattgcgtgatttttggcggccccgaaggcctgtacgcgtttgccatgggcgctggcggtggtatagatatgttccgcgacggcggaggaaccgacaaagctgacggcctgtacgcgagggtcgctggtcaacaggctagccgcctcattgccacagtgaacaacgttaaacacgccgtccggcaggccagcctcctgcagaagctgcgccatacgtaacgatgcggacggcaccagtgcgggcggtttcaggacgaaggtattgccgcaagccagagcaaccgggaacatccacataggcaccattgccgggaagttaaacggtgtgatgcctgccacaaccccaagcggctgcattaatgaaaagctgtcaacgcctgagccgacgttaaaggagtactctcctttgctgaggtgcgggatcccgcaggcaaattcgacaacctctatgccgcgcgtcagctcgccaagcgcatctgaccagaccttgccatgctcgctgacgatcagcgccgccagttcgtcccgatgcttttccagtaatactttgaattcaaaaaggatacgtgcccggcgtagcggagtcattttactccatgccggaaaagcctcatgtgcgctttgaattgccgccagcatctcctctcgggtgctctgggtgacctgacgaattactttaccggtggccggattagtcaccggtagcgtctcgccgctgctgctcagtgtcgttttaccatgaataaaattgccgactgtttccatctcttttttatcctcttaaaccgatgttgacgacgttctgactgagcggtcacaggaaagcctggttatcttcagcctaaaacgcataccgtattcaatgtaaattttaggattaaaaatttcaaatttatttttatgaaattttattttgaaagtttgacggctgatttttatacgatggtatgtgcagcaagaaatcaaaaatataattaacttattgatttttatcgtttttatttggtgtgtcatcaatggttgtctgttgtgacgaggaaagatttggaaaaaattatgatctatatagcatttttgtttcatttggtgtggtataaaaattcaaatttcaggggggtttcggcaccacagtttcggatattggagggtaaatcatgcgcttgtgcttctgtccttcagaacgagagaataaggctcagccccagttggcgtatgtgagtcaggtcagtgagagcaatggtccgtttgtccggttcatgcatatgcacccacagaccgttgaactgattcttatcaccgaaggagacggggagtatttcattggcgatcgcatctacccagttcgtaaaggcgacctggtcatttataacagccaggtggtgcatgatgagtatctggaaagcgggcggccaattggcactatttgttgtgggattaacaatatttcgtgtccgggtctacgtgagaatgcgctaataccggatgatattgtgccggttattccactgtatcaccattatgcgacggtggaaaaactgatgagctccgtgtttaccgttattaatcagcatgcggtagaagggccagcaatggcgcagctattgacccaggtagtactcaaatacattgagggaaatgtcttattgcgcacaggtaacgatgccatacagcgccatgaaaatttacttgattcaataaaatcctatattgatcgcaatttctatgagccaattcggctggatacgctggcgacgaaatttaatgtcagtccttattatgtttcccatgaatttaaacgccgctatggttattcaccgatggattacctgataaaacgtaggctgggggaggcgcaatcgttactaaccacggatgaaggcgggcgcgaaaagatcacctctattgcttatcgtgttggctttagcaaccttagtcattttcagaattacttcaaaaataaagtagggaaaacgcccggtcaatatcgcaaggactatcgtaaagctaattatttattatttgaatattaatgcttgctaaaatttaatcgtcatgagaatggtcgcaatactgcggccattttttatttgtcggtatattttatgcgtttatctatagcgcgaaaagtctggcaatatcattaaagagtgatgatttttttgtgatacctgacgcatttatcccacttcttcaaccaggatagataaagtttttcaggctacaaaaagtaatatgttgtccatcaaaggttaatttgcatcgcggtatgcagtaaaagcgtttcattaagtgggagccagcaatatgtacaatgtaaaaaagagcattaagttggggattgcgcctatcggttggcgcaatgatgatattcctgagattggtaaagaaaatacatataaacaaatacttagtgatgccgcgctcaccggtttttccgggacggaagttggcggttgttatccgcaggatcctgctgagttaaataaagagttaatgcttcgcggactggaaataccaggccagtggttttcttcctttattattcgcgatggtattgcatctgcgatgaatgcttttgaacagcattgtgcttatttgcaggcaatacatgcatatgtcgccgttgtttctgaacaaacttatagtattcaaggcattatcgataagtgcgtttatacagagaagcctaacttcagcgacagcgaatggcagcttttatgcgaaggacttaatgcgcttgggaagattgccaatgcgcacgggctgaagctcgctttccatcatcatatgggcaccggtgtgcagactctgccagaagtggatcgactcatggagaataccgatccgcaatttgtacatctgctgtttgataccgggcatatatatgtttctgacggcgatgtcatgccgctactgagtaaacattttgatcgtattaaacacgttcattttaaagatgtgcgtaatgaaaaactcaaagcatgtcgcctcgcgaagaaatcattcctcaattctttccttgatggtgtgtttaccgtccccggcgatggaaatattgattttaaatccgtattagcttatctggtcgggcatcaatattctggctggattgttgttgaggccgagcaggatcctaagaaatataacccattggaatatgcgcaaaaaggtaaaaagcatattgatgagttactgaaaaattatctttaattgaaaaggaaacagaaaatgactttaaaagcaggtattgtaggtatcggcatgatcggctccgatcacttaagacgtctggccaacaccgtgtcgggtgtagaggttgttgccgtatgtgatatcgtcgcgggtagggcgcaggcggcgctggataagtatgcgatcgaagccaaagattataatgactatcacgatctgattaatgataaagacgttgaagtggtcatcattaccgcatcaaatgaggcgcacgccgatgtagccgttgccgcgctaaatgctaacaaatatgttttctgtgaaaaaccgctagcggtgacggctgcggattgtcagcgtgtgattgaagcagagcagaaaaatggtaagcgcatggtgcagattggttttatgcgccgctacgacaaaggttacgttcagctgaaaaatattatcgacagcggcgaaatcggtcagccattaatggttcatggacgtcattacaatgccagcacggtgccagaatacaaaacgccacaggctatctatgaaacattgattcatgaaattgacgttatgcactggctgcttaacgaagattataaaaccgttaaggtttacttcccgcgccagtccagcctggtgaccactctgcgtgatccgcagctggttgtaatggaaaccacctccggcatcaatattgtggttgaagtatttgtgaactgccagtatggctacgacattcactgcgatgttaccggcgagaaaggaatggcggagctgccaaccgtcgccagcgccgcggtacggaaagcggcgaagtatagcaccgacatcctggttgactggaaacagcgctttattgatgcctacgacattgagttccaggatttcttcgatcgtctgaacgcaggattgccgccggcaggcccaacgtcatgggatggttatctggctgcggttaccgctgatgcctgcgtgaagtctcaggaaacagggaataccgagattgttgaattaccctcaaaacctgatttctacaaataaaccttccgcgtattaaaactcctgccggatagcgatgcttaagcgtcctatccggcatatcacaatttattatcttcttttatccggaacttccctatgaaaggcagactcatctcttccgatccgtatcgtcagcaattccttgttgagcgtgcggtctctttttcgcatcgtcagcgtgattgcagtgaattaatcagcgtcttaccgcgccacgcgttacagcagattgacggattcggcggcagctttaccgaaggtgcgggcgtggtattcaacagcatgagcgaaaagacgaaggcgcaatttctttccctttatttttctgctcaggaacataattacactctggcgcggatgccaattcagagctgtgatttttccctgggcaattacgcgtatgtcgattccagcgctgacctgcagcagggacggctctccttttcccgcgatgaagcgcatttaataccgctgatttccggggcgttgcggttaaatccacacatgaagctgatggcttcgccgtggagtccgccggcgtttatgaaaactaataacgatatgaacggtggcggcaagctgcggcgcgaatgctacgccgactgggccgatatcattatcaactacctgctggaataccgccgccacggcattaatgtgcaggcgctctccgtgcagaatgagccggtggcggtaaaaacctgggactcctgtctgtatagcgtggaagaggagacagcctttgccgtgcagtatctgcgtccgcgcctcgcccggcagggtatggatgagatggagatctatatctgggatcacgataaagatggcctggtggactgggctgaactcgcctttgctgacgaagctaattataagggaattaacgggctggcattccactggtataccggcgaccatttttcgcaaatacagtatctggcccagtgcctgccggataaaaaactcctgttttccgaaggctgtgtgccaatggagagcgatgccggtagccagattcgccactggcatacctatctccatgacatgattggtaatttcaaatcgggttgtagcgggtttatcgactggaatctgctgctgaacagtgagggcgggccgaatcatcagggtaatctgtgtgaagcgcccattcaatacgatgcgcaaaacgacgtgctgcggcgtaaccactcctggtatggtattggccacttctgccgctatgtgcgtccgggggcgagggtcatgctttcttcaagttacgataatcttctggaagaggtgggatttgtgaatcccgacggcgagcgtgtgctggtggtgtataaccgcgatgtccaggaaaggcgttgccgggtgctggatggcgataaagagatcgcgttaacgctgccgccgtcaggcgccagtacgttgctatggcggcaggagtcgatctgaatgatgaagctgggatttaatgaagcgacctgtatgcgaaactccacgctggcacaggatgttgtgttggcggaacgttttggctatgactacatcgaaatccgtctggatatgttgcaggagtggttgcagaaacatacgttaagcgagctggcagacattttcgccgtcggccaccttaagccctggggctacaattcgctggaagacattacgttttgtgatagcgaaagctgggcggagaaactgcggcagttggctttcgcctgccatgctggctcagtggtggggggtgattgtctggttgtggtgcccaccattcgtcaggggggaaattttccgccaggggaaacggtgaaagattcagtgaagcgtctgcgcgagatggcggcagtggcggaagaaagccggatgcggctggcctttgagccgatcggttccgcaggatgctgtgtgcgcagtcttgccatggcgatggagatcgtagatgcggtcgatcgcagtaatgtcgggctggtcgtcgatgcctttaatctttacctgcacgatcaatggcgggatctgaccacgcttcgccagatccctgtggaaaagatcttcgtttaccatattgatgacgccgataatctgccgctggcaacgctggagcattgccatcgtctgtttcctggcaacggcgtgatcccactgcatgagatcacgcatgagctagtgcagaagggctatgaggggatctgttcgctggaactgtttaaccctggctactggcagatggcggccagcgaagtctttgcgataggggcggaaaagactcgccccttcttaacagcttaatgttgccgcagcaagagatggacaaccgccgcgcccagcagcgcgcaggccgcggccagaagaaagacctgctgatagccgataaacggcgtcagcaggcccgctattggtccggtaaatccgtaggccagatcctgaaacgctgaccagacgccgagggccgtaccacgaatctccggtggcactctgcgcacaacctctacgcccagcgatgggaacatcagcgaacagccgcagccggtaatcgccgcgccaatcagcgcagcgcctgctgacggagcggcccacattaccgccagtccggtcccctctaccagtagtgaaaaggttgcgaccgtggcgccgccgtaacggtcgggaaatttggcgcagaaaaagcggacagcgataaacgcaatgccaaacagcgtcatcgcaaaaccggtgttatcccagtgacgctcgttgaaccagagggcggtaaacgcgcttagggtggcaaaaccaatgccctggagcacaagccctgttccgggccgccacaccaggccgactacccgtagcactggcacgcggggacgggctgttgggatattccccggaatgccatagatgactccgctggcgatgatcggcaacagcacgacgaggagcgccggaagcgccaggccggccctggcgtaaagcgacagccccagcggcgcgccgatagccagcgcaccgtaggtcgccatgccgttccaggaaataacctgacccgcgtgggtcgagcccgccagccacatcccccaggttaaattaccggtcaaaatgaaactttcaccgatgcccagcagcacacgaccaacaatcagtatggcccatgcgagcagcggaaccgggtgagcgattagactgaccagcatcagcagacctgatgcggcgcagtagaactgaccggtgataaccgtccgacgtccgcctgacgtgtcggcttttcgacccgcggcgccccgggtaagcaaggtggcgataaactggctgcctaccgcgataccgatcaacagatcgctcagatgcaactgctgctgaacgtacagcggcagcatgactaacgggatgccaatagtcagatagttgagaaacatcgcggcgctgatgcgaaacagcgtgatcgatgtggaatgttgtgtgagagctggcatggaatcgtccttgaacacgccccttgtccgatgcagacacggggcgtgatgaggcaggcattaacgtgccgggcggtattcgcgccagtagtcgataagcatgcggtatttttgtttcaccgttgcgatgagctgttcatcgttaagctggccgcctaaccactggcgtgacggttcgccaaagatggtccggccgacggcgaaacctttcacccagggcatatccgctgctgcggcgaatcctgacttcaactcgctttccggtgcgtccaggccaagtatcaatataccgcgacattcagggtcataatgctcaatatgctggctgatttctcgccaacgatctgggcttaacggcggcagtttccaccagtccggcaggatccccagttgataaaaacgttccacaatctgaggatagtattgctcattttggtctgccgcatcgcgcggcaagatgacttccagcagcagatcgtgaccagactggcagcaggcgcggtaaacctcgtcaatgagcgcctcttgttcaagacgtaccgactctgcatcgagtggatgatagaagaccagacatttcacgacgtgctcttgcggccagctgacaagctgagagccaatatcgccatgttccagcttcagcggatacgaaccgggcatctcaaccggtcggccaatccaccatccctggccggtcacgtcgttaagcgcctgctgaccaaaggtggtatcggcaaggatgccgctattattctgtaaaccggcctcaagcgccgcctgacgtgccccttctagcagtagcatcttcagggggggatcgcggattcactggcgccgacttcatttgcgatatccaccagttgcttgcgatggtcaaaggcgaatacgcacagctccggccagtgctgtttacgggttgtgacccgatgaaggtgattcagccgcgggtctttgtctggccgggtgatggattgttcacgcgcgaggtagtcgtccagctcttttttggttggcatggcgggggcacaaccgtggcgcgataccactaacgcgccgcaggcgtttgcataacggcaggcttgctcccagctttcatcgttcaggtatccccgcagcagtcctgacataaaggcatcgcccgcgcccagaacgttcagaacgtctacgcgaacgccgctatgtatcttcacctgcgaccagtcatcggcgatgttgccttcaaagactgagcagcccagcgcgccgcgtttgcacaccagtacggcctgggtcaactgacggacgcgccgcagggcggtcagcgtgtcggtactgccgccggcgatatggaattcttcttcggtcccaacgatcagatcgaaatggcgcaatacctgctggagctgttcggtaacctgtgatgaggcgatgaaacgcgtttcaccgtctcctagcgacgtcaggccccacagtacggggcggtagtcgatatccagtgcccgccgcagcccgtgtttttgcgcatactccagcgctttaagaacggcggcgcgcgtattggggtgagaaagatgggtaccggtgacggctaatgcgcgtgaagaagcgatgtaatcttcgcggatatcctcaggtgttagcgccatgtccgcgcagttatcgcggtagaagatcagaggaaaggtgtcctgatctttaatgccgaggatcaccagcgcggtcagacgatcgcgatccgacagcaggcactgcgtatccacaccaacgcggtttaattcttcacgaacgaaacgtcccatatgctcatcgccgacgcgggccagcatagcggaacgtaatccctgaatggccgtgccgtaggcaacattgcctgacgatccccctaaatatttagcgaaagtcgtcatatcctccagccgtgacccgatttgttgaccatacaaatcaacggcgactcgtcccagacagataacgtccagcggcttttgctcactactgactgctttattcattgacatatcccctaacagaagacggtgttatttttgctcatactaaggtttggtgatttcattttcaataaaaatggaaataatgttttcatttattgtttgaacaagatcacagaaatggcatttccgggcaacgggcatgatcgttttttgttgtgttttttgttttaattgattgattataaatgtgttatttattttaaaatcgcatggaagataaatttcattttcatgaaaaatacgcctgaatgtcgaaattttttaaccgttttttgatctccttcccataaatgaaatataaattccatatgattgtgagaacggaaattttgatcctatgataagtctctgtgtttttggggctgaagcgatgcataagcaggcaacgacagccgaacggttgataaaagcaggtggggtacatgaaaacaatcaggttgaccatggcgcaggctttggtgcgctttcttgataatcagtacatcgacgtagacggcagcgaaatcaaatttgtaaaagggattttcgccatttttggccacgggaacgtcgtcggattggggcaagcgctggaagaggactgtggccaacttagcgttcatcaagggcgtaacgaacagggaatggcgcatatcgcgacgggatttgcccgccagatgcgtcgccatcagatttatgcctgcacctcctcagtggggccaggggccgccaatatgatcaccgcagcggcgaccgcgacggctaaccgtattccactgcttttgctgccgggcgatgtgtacgcatcgcgtcaacccgacccggttttgcaacaggttgaacaagaacacgatttgacgctgagcaccaatgacgctttccgtgcagttagccgctactgggatcgcattacgcgtccggaacagctaatgagcgcctgtatcagcgcgatgcgggtgttaaccgatccggcggatacgggggccgtgacgctttgcctgccacaggatgtgcagggtgaagcctgggattatccggattattttttcgctcgccgggtctatcgtcttgagcgtcacgcgccgacggagccgatgctgaacgaggcggttgcgctgattcgccgccaccagcggccgctgatcgtttgcggcgggggcgtgaagtactcgcaggctgaagaggcgctgctgagatttgccgaacgctgtcatctgccgattgctgaaacccaggctggcaagggagcgctcagttctgcacacccgctgaacgtcggcgggattggcgaaaccggttcactggcggcgaatctgctggcgcaggaggccgatctgattatcggtgtagggacgcgctataccgatttcaccacctcctcaaagtggatcttccagaatcccgacgtgcgctacttaaatatcaacgttagccgctttgatgtcttcaagctggatggcgtacagatgcagggtgacgctcgcgtcgccctgacgcagcttagcgaacggctggcccaggagcattatgcttcgcaatggggtgagactattcaccgcgtccgctcgcaatatatggcggaagttgagcgcgtctatgctgtggaatatagcggagagggcttcaaacctgaaattgaggatcatatggatactcaaaaggtgtttgaagagtttaatgagattacgcggtcgtggctgacccagacgcgcgtgttgggtgtgcttaaccggatgttgccggaaaacgcgctggtggtggcggcggcgggcagcctgccgggcgacctccagcgtgtctggcaaagccgcggcgagaatgattaccacgtcgagtacggctactcctgtatgggctacgaagtcaatgccgcattgggggccaaactggcgcagccggagcgcgaggtgtacagcttcgtgggcgacggttcgttcatgatgctgcactctgagttggtcacttccgtccagatggggaaaaagattaccgtcattttgctcgataacatgaccaacggctgtatcaataatctgcaaatggaacacggtatggacagttacttcaccgagtttcgtttccatcagcaggagagcggtcgtcaggaaggcgggtttatcccggtcgatttcgctcgcatcgctgaaggatatggttgtaaaagctatcgcgtcaccaccattgaacaactgcatgaagcgttggaagatgctcgtaaacagaccgtgagcacgctgatagacataaaagtgcttcccaaaacgatggtgcataagtacctgagctggtggcgcgttggtggggcgcaggtatcccgtagcgaacgtatccaggcggtagcgcgtatgcttgaagaacatatcggacaggcccggcagtactgattaatttgccgtcgttcaggttgcagaagtgtggttattgttctgcaacctgaacgatacagcgtcaacgcattgtttgcttttcagaacggcaaaataaaacgatccgtttttcgcagaactacggatgcttttcttttgcggttttaaatttactattcatgagattaagaggtacgaatgaaaaagcttcgatgtggtgttattggcctcggtcgggtaggtaaaatgcatgttgagaatatgtatttactgcctcaattagatattatctgcgccgccgattattttattgaggagatgagcgattggctttattcggtaaatataacttcagggtataaaaattatcaggaacttttacagcgtgatgatatagaggcagtttttattttcacctcaacggatatgcacgaagagatcgtcacggcggcagcgcaggcggggaagcacattttttgtgaaaaaccgctcagcatgaatgaggatgagcaggcctcaatggcggtgctgagaaaagtgaaagagaagggggtgacgctgcaggttgcctttaatcgccgttttgatcctcagtttcacgaggtctttgagctggtgcgcagcggcaagattggtcggccccagatgataaaaatcacctcccgcgatccggacctgctaccccatgatctgatcaaacgtattggcggtctgatttttgacttcaccatgcatgactttgatatggctcgttttatgatgcaggatgaagtcagcgaagtctatgttaagggcaatacgctgattgatcccagcctgaaaaatattgatgatgttgatacgcttgcggtgatgctgactttcagaaacggcggctacgcgctcattgataacagccgtcgggcggtatatggctatgaccaacgggtggaggtttttggctcagaagggatggcgtatgcggataacgttagtgagtcgacggtgaaagttttcaacagccagcactgcataatgaaaaatccccttcctgatttcacggtccgttatcgcgaagcttaccgaacggaaatattacactttattgattcagtcctgcatcatacgccggttgtctgtaccggcgaagacgcattattggcccagcgtatcgctattgccgcgcagcaatcattaaaaagcgggctgccggtgaaaataacaagcgatatttatctttaactgcatctattaataatgaagaaactctcgcactgaaaagtgtgagagcttttctataccgaggataataaaatgaaagaaatgcaggcaacgctgccccagacattttatataaaaccaggtaagtttatctggagctacctgggaacatttttatttatgttgggcggctgtattgagaacagctggttatctgcctggttaaatacgcaggggtttgatcaggcgcatatcgggcagatttttgccgggtatgggattgtggtcgcgattacctcctggctatccggcgtctgtgtggacgtttttggtcctaaaaaggtgatggttaccggttttatcgtctatcttctggcttccgtcgcgtttctgaactttgcgctacccagccatgattttggcgcaattcttgttacctatatgctgcgtggcgtggggtatccgctggtctgttactccttcctggtacgcctgaccatccagttggataatcaccagcaagggatcggcacctcgctattttgggtggtctataaccttggttttaccatcattgggccggtggtggcggcgtcgttaattcctgagttggggcatatcaacgtgatgtgggccgggatgggcgttgcgctgctgggggttctcttcatgctggtgctggaacgcaatgaattcattctgaaaccgcgaacgacgccggtcttcaaagagttatctgcgggtatctccattatgtatgaacggccacggatcggtctggcggtgattgtcaaaactattaacggtcttggcacctatggttttgttgtcgtattacctctgtttctgctggataagcactttacgcttgaggaatgggcgagtatttgggggattacctttatctctaaccaggtcttcaacattatctttggctggatgggcgataaaattggttttcgccgaaccatccagatttttggcagcatcctgaccggtgtcgctacgctgattgtttactgggtgccgatgatatgggggcataactatgtcgcctttatgctggcgatgtgtttgtggggagccgggctggctggctttgtgccaatgacgccgctggtgccgatgatggcgccggataagaagggggcggcgaactcggccgtgaactttggctccggcctggggaatttcgttgggccagcgctggtctccgttctggcagggttcggcaccggcgtggtgatgtatactatggcggggctctatttattcagcggcatcctggtgcagtttcttaaagtgcctggcgagaaatagcttcaaatattcttcaaaaatcccttatagcctgtgatgttcatcactaaattaaaccggtttttatcaagattgataaagccggttttttcaccctacgttaaattgtactaacggattacggttatttacccactcatatacgttcagggagaaaataatgaatatcgaaaaaacacggttttgtattaaccggaaaattgcaccgggtctaagtatagaagcattctttcgactggttaaacgtcttgagtttaataaagtggaattgcgtaatgatatgccaagcggcagcgttactgatgacttgaattataatcaggtgcgtaacctggcagaaaagtatggacttgaaattgtcacaattaatgcggtctatccctttaaccaactgaccgaggaggtagtaaaaaaaacggaaggattattacgagacgcacagggagtcggcgcgcgggcattagttctttgtccgctgaatgatggaacgattgtgccgccggaggttacggttgaggcaataaaacgactgagcgatctctttgcccggtatgatattcaggggctggttgaacctttgggattccgcgtaagttcgctgcgttctgccgtctgggctcagcaactgatccgggaagcaggttccccctttaaggttttgctggataccttccatcatcatctgtacgaagaggccgaaaaggagtttgcgtcgcgcattgatatttctgctatcgggctggtgcatttgtccggtgtggaagacacccgaccaacggaagcattggctgatgagcagcgtattatgctgagtgaaaaggatgtaatgcagaattaccagcaggtgcagcgtctggaaaatatgggatatcgcggtatttacgcttttgaacctttttcttcccagttggcttcctggagtgaggcggaaatagaggaacaaattaatcgcagcgtgtcattgctgctgcaatgatacagctaatttccaggtgaccgttttcagtttccgcagcgtggtatttacaatgaaaattgcttttgatgtcgatgttattaaacatttacccattacccaaatggtacggcaggtttccgagtgggggtataaatatattgagcagtcgccgcacccgcgtattaatccgttttataaacaccctaaagctggtcgcgataccatgcaggaatataaacgcgccttgcagaactacggtgtggaaatctcgtcatttattgtggtttatcgttggtccggccccgatgaagagcgtcggcgcgccgcggtaaccaactggaagcggatgattgagattgccgttgatatgggcgtacaggtgattaataccgagctttccgggacgccggatgagccggagatttgtgaagagatgtggtatcgctccatggaggaattgctgccgatcgtggaacgagagggaattcgaatcgaaattcagtctcacccctgggatttctgcgaactgaacgatgagacggtcgacatggtgcagtctttgcgtagtgataacgtgacctatctgtacagcgcaccgcatggcttcttttacgataaagggcagggcgacgtcgcaaggatgctgaactatgccggggccgatctttcgcatgttctgctggccgatacgcacaaccacacgcttccctgccgctatatcatgaacccgcctggcgtgaatgcgacgattcatcagcacatcgggctgggagaaggtgaggtcgattttgacgcgctattccaggcactgcgtgaaatggattttgcaaaccgcacgtttaaggtgggcggtgaggcaattatcaccacgtcgctgtttggttatcctgagaaaatgagtgttcaggcggtggaaacgcgcgagcggatcgagcgggagctactcggacgttaaaaacgggtggatttgcctgtaccgcgccacaggctggcgcggtcatttgcggcaattacccttcgttttccgccagctcgcgcagatactggaagatctgacgcgctgatttcggcggtttgttgccttctttctctttcttcgcattgcggatcaatgaacgaagctgttgacgatcggcgtgcggccacagggtcagtacttcggctaccgcgtcatcgccttcgacgatcagacgatcgcgcagatgctcaagtttgtgaaacagcaccacctgctgattatggcggttcttcagcttgtccagcgcctggcgaataggttcaacgtcgcgttggcgcagcatttttccgataagctgcaactggcggcggcgtccttccattttgatacgctgggccagttcaatggcgtcgcgcagatcggcgtccagcgggatcttatccagcgcgtttttccccagatccaccagttccgcgcccaggcgttttaattcctcggcatcgcgtttaatttcacttttactgacccagataatttcatcgtcttcgtcttcgatgtcatcaccgggaacgtcgtcgagccagtcttcgggctgctttgtcatgtcaggctccttaaaaaaagaggctaatgttaccagttaagatgcgcactgaaaaacggttctctgttagacttcagagaaactctctctacattatggcatttgcaatgaaagtaatctcacaagttgaagcgcagcgtaagattctggaagaagcagtttcgacagcgctggagttagcctcaggcaaatcggatggggcggaagtcgccgtcagcaagaccaccggcattagcgtcagcacccgttatggtgaagtagagaatgtcgaatttaatagcgacggcgcgctgggtattacggtgtatcaccagaaccgcaaaggcagcgcctcttcgacagatttaagcccgcaggcgattgcccgtaccgtgcaggccgcgctggatatcgcgcgttacacgtcgccggacccgtgcgcaggcgtggcggacaaagaactgctggcgtttgacgcgccggatctggacttgttccacccggcagaggttacgccagacgaagccattgaactggccgctcgtgcggaacaggcttctctaaaggcggataaacgcatcaccaataccgaaggcggtagttttaacagccattacggcattaaagtgttcggcaacagccacggtatgttgcagggatattgctccacgcgccattcgctctcaagctgcgtcatcgccgaagagaacggcgatatggagcgtgattacgcttacaccatcggccgggcaatggcggatctgcaagcgccggaatgggtcggggccgagtgcgcgcgccgtaccttatcccgcctgtcgccgcgcaagctctccactatgaaagcgccggtcattttcgccaatgaagtggcgacagggctatttggtcatctggtcggggcgattgccggcggcgcggtataccgtaaatccacttttctgctcgactcgctgggcaaacaaattctgcctgaatggttaaccatcgaagaacacccgcatctgctaaaagggctggcgtcttcaccgttcgacagcgaaggcgtgcgtacggagcgccgggacattgtgaaggatggcgtactgacgcaatggttgctgaccaactattccgcccgcaaactggggctgaaaagtaccggtcatgccggcggcattcataactggcgtatcgccgggcaggggctgaactttgagcagttgctaaaagagatgggcaccggcctggtggtgacggaactgatgggccagggcgtcagcggtattaccggcgactactcccgcggcgctgcgggattctgggttgaaaatggtgaaatccagtacccggtaagtgaaattaccattgccggtaatttaaaagagatgtggcgtaatattgtcaccgtaggtgatgatattgaaacgcgtagtaatatacagtgtggttcggtattgttaccggagatgaaaatcgccggacaataatacccgtcatacttcaggctgcaggcgcgttggctgcctgcaacccgaattattcagggtattacacttatcgttaataataaaaaaggaagtgagcaatgcgtaaaagcctgttagctattcttgctgtgtcatcgctggtattcggttcggctgtttttgctgccgatcttgaagataatatggatattctcaatgataacctgaaagttgttgagaaaacggatagtgcccctgaactgaaagcggcattaaccaaaatgcgcgcggccgcgctggatgctcaaaaagctacgccgccaaagctggaagataaagcgccggatagcccggaaatgaaggattttcgtcacggttttgacattctggtcggccaaattgatggcgcgctgaagctggcgaacgaaggtaacgttaaagaagcgaaagcggcggcggaagcgctaaaaaccacccgcaatacatatcataagaagtatcgttaatttttgtgggatggcggcttcgctttatccgcaggtcgccatccggcaaactgtaatacccatcacactttctcactttatacgacaacgtcattgttttgccatttcctctttatgccgcgatagatctcacactttcccggcgataattcattaatgccgccttttctgtggcgcagatcacctatcccactcgcgtttccacttcgaggtggaaaataactcgctacaaacttttaacccttaccgctagttttatctcattgccattaacggggtgagacgcgtggataacggagcagtaaaacacgatgccggtgagcgaattaacgaactggctgaacaggtgttaacgcaggtggatggcctgctggggcggcatcacattgtccccaatgcggtacagacgcaaatgctgacctcgcacgttcgcgcgatggcgcaccggtcaattaccggcgagcctttaccggaagtcgatgccagcttgtttgatgaaatctcagccgaatcaatggcgctcgcccgcgaaatcgtggcggcgtttggcaaccttcctgacgaagaagcctggctattatcggtacattttgaagtcgcgaaagacaacctctaaggagcaaaaaatggaacagattaccgtcgtgattggcgatcgcctgggtaaaggccagaaagtggcggcaggcgtggaaaaagcgggcggtcgcgcggtcgtcgtgccgggcgtcgcggcagacatgaagctgggcgatgtgatgaaagcggaaaacgccaccttcggcatttcattttgcggcagcggcggcgcgggcgctatcaccgcgcaaaacaagcatggctacaaagccaaatatgggatgcggtcagtagatgaaggcgtcaccgctatcaatgagggctgcaacgtgttgggtttcggctttatggataaagaagagctcggcgagcgcctggtgcaggcgtggcaaaagaaatacggcgcctgatgatgaaagagcaattcaccaccacggtgagagtaaaaggcaagggcgacgccaaagcacgcgcctttgccgatgcgctgaaccatgttcagtcggcggtgatgagagagtcgccgtatatcttactgcgtattgagccacaggatgtgcggattgttcaggcgcatgagtcggtgcgtaaagaggcctttctgtttttctttttgcgccgggaacgacgcacttacagcgtggagctggatgtgaccgtcaacgtgaccgccatcaatctcgacagggtggatttcgtcgcgaaacgctgatttttattaaaaaggcatagttatgttcctgataatactaattaaatcgctcattatcggcgcgctggtcggcgtaggggtgggcgctggggctgcacgcatgtttcacgcgccaaccacgcaggggatgggcgcgttccgtacgttgggcgaactcaactcttgtgaaggcgacccggcatctcacttctcctttgggctgggtttcttctttaacgcctgggcctcgtctgtggcggccggatcgttcacccaggatgtcgatcaccgcatcatccctaactggggcgcggcggcgctaatgatcaaaaaccgtaacgtcggcgagacgctgcacgacccgaaaaaaatggcgatcgcctgcgccgtcatcggcatgatagtcgtgacgttccttaacctgaccgcctcatccgtgccagaagcgctacaggtgacggcggttaaggtgctggtaccggcggcaaacctgctggtcaacatcgtcatgcctgtgatcttctggttagcagcgatcgacgccggtaaaaaatcgggcttctgggccaccgttttcggcggcgcggcgcagctcatcatggggaacgccgtaccggggctggtactgggtattttgatcggtaaaggcgtagaagagagcggctggaaccatgttaccaaagtgatgatggtcgccatcgttttgctgtttgtgttgagcggcttcttccgcggcttcgacatgaaaatgatcgagtctttcaacatgacggtaccgaactggcttgaactgatccacaactcgctcagcggcaaataacggaggccacaatggaagagaataaaggtttttggtatgccgactggtcgttcccgatctttgttggcctgctctcctccggcgttttcgccgggacgcatatgtactatctgtacggcatcggcgcatttaacgaagtcgcttttgtggcgatgttgaaagcggggatggataccggcgtctacggcgcggtcgccgctttcggcgccagctttttatttgcccgcattatcgaaggttcgctggtcggaattctggatatcggcggggcaattcagaccggcgtgggcttaggggttccggcgttactgctgggggctggctttgtcttcccggtggcgaactttatcgcttcgctgataaccggtctggtgattggtctggcgattggctacatcattattctggcgcgtaagttcaccattaatcagagcgactccacgtacggggcggacgtcatgatgggggccggtaacacttcaggccgttttctggggccgttgattatcctcagcgccatgacggcatcgattcctattggtctgggctctctggtgggcgcgctgctgttttatatctggcagaagccgattactggcggcgcgattttaggcgcgatgatcctcggttccatcttcccggttgcgattagctaactgttgatttgtaggccggataaggcggttgcgccgccatccggcaaaggagagaacgatgtttgatttactcctgcgccatgcgcgtctggtcgatgacacgttgactaatattgccctgcaagatggcaaaatcgcggcgttgggtgacgttgatggtccggcgttgaaaaccattgacctgcgcggtgagtgttttgtcagcgcgggttggattgattctcacgttcactgctacccgacatcgccgatttaccacgacgaaccggacagcgtgggtattgccactggcgttaccacagtggtggatgcaggcagcactggcgcagatgatattgacgatttttacaccctgacccgtgacgcgaccaccgacgtttatgcgctgctgaatgtttcacgcgtcggacttattgcccaaaacgagctggctaacatggccaatattgacgctgatgcggttcggcaggcggtaaaacgccatccggattttatcgtcggcctcaaggcgcggatgagcagcagcgtggtaggcgttaacggcatcacgccgctggaacgcgctaaagccatgcagcaagaaaacggcaacctgccgctgatggtacatattggcaataacccgccggatctggacgaaatcgcggagcgtctgacggcgggcgatatcattacccactgttacaacggtaagccgaaccgtattcttcggcctgacggcgagctgcgcgcctcggtgacacgagcgctggcgcgcggcgtgcgtctggatgtcgggcatggtaccgccagcctgagctttgcggtggctaaacgcgctattagcctggggattttaccgcataccatcagttccgatatctactgccgtaaccgcatcaacggcccggtacattcgctggctaatgtgatgtcgaaattcctcgccatcggcatgtcgctgccgcaggtcattgcgtgcgtgacggccaatgccgccgatagcctgaatctgaaaaccaaaggtcgtcttcagcctggtctggatgccgacctgaccctctttacgcttaaacgccagcccaccgtgttggtagacgcggaaaacgacagcttacaggctgaagaattgctgacgccgcttgccgcgatacgcgcaggcaagggctatatgaccgaacaagggagcgcggaacatgccttcgatttttgagaagtatcaattaaaacaggtgattaacgcctccggacgtatgacggcgctcggcgtctctacgccgcgcccggaagtgatagacgcggcgatggccggaatgaatcagtatttcgagatgaaagatctggtgaataaaaccggtgagtacattgcgaaattgctggaggtggaaggggcgacggtagtctcctgcgccagtgcgggccttgcccagtcggttgccgcggtactggttcaggacagcgactggctgctggaaaatctgcacgttacaccgattgaaaataacgaaatcgtcctgccaaagggccacaacgtcaactttggcgcgccggtgggaacgatggtggcgctgggcggcggcaaactggtggaagccggttacgccaacgaatgttccgccgcgcagttggcggcggccattacgccgcgcacggcggctattctctatatcaaatctcaccactgcgtacagaaaagtatgctcagcgtggagcaggctgcggtggtggcgcgcacgcataatctcccgctgattgtggacgcggcggcggaggaagatttgcagtgctactaccgcgtgggcgcagatctcgttgtctatagcggcgcgaaagcgattgaagggccgaccagcgggctggtgattggcaaaacgcagtatgttgagtgggtaaaacgtcagtcagcgggcattggccgggcgatgaaggtcggcaaagaaggaattgttggcctgacctgcgccattgaattgtacctgcgggcgcaaaaagagagcggcgcggagatggtagaaaaaatggcgccctttatcgacacgttgaacacgtttaacggcgtcagcgcccgcgtagtgtgggacagcgccggacgcgatatcgcgcgcacggaaattaagtttgatgaagccgttaccggcatcgccacaggcgaactggtcgacgcgctgaagcaaggggaatacgcgatttactttcgcggatacaaagccaacgaagggattattgaagcggatgtccgcagtgtcgatcgcgcgcagttagcgattgtggcgcgtcgtattggcgaggtgattaatcaggagaaacaagcatgaaactgacccctaacttttaccgcgatcgcgtttgcctgaacgtactggccggttcgaaagataacgcccgggaaatctacgcggcggcggaaggtcatgtgctggttggcgtgctctccaaaaactatccggatgtggcaagcgcagtcgcggatatgcgtgaatatgcggcgcttatcgataatgcgctctccgtcggactgggggcaggcgatcctaaccagtcggcgatggtgagcgaaatctcgcgtcaggtacagccgcagcatgtcaaccaggtgtttaccggcgtaggaaccagccgggcgctgctggggcaaaatgagacggtggtgaacggtcttgtctcgccgaccggcacgccggggctggtgaaaatttccaccggcccgctaagcagccgcgcgccggacggcatcgtacccatagaaacggcgattgcgctactcaaagacatgggcggcagctctgttaaatactttccgatgggaggactcacctgtcgcgacgagtataaagcggtagctgaggcctgcgcccgccatgatttctggctggaaccgacgggcggtatcgatctggaaaacttcgccgagattctgcacatcgcccttgatgcaggtgtaagcaaaatcattcctcacatttatagttcgattattgataaggtgagcggcaacacccgtgcggacgatgtgcgtcagttactcgctatcgtccggtcgcgtgtcggctaatcatgaggagagagacgtgcgattccccaaccaacgtttagcgcagctatttgcgatgctgcaaaacgagacgctgccgcaggacgagctggcgcagcggttgtcggtctccacgcgtaccgttcgggcggatatcgccgcgctgaacatgttgctgacgccgcatggcgcgcaatttactctcagccgcggcaacgggtatcagctcaaaattgatgatccggcacgttatcaatccctgcaaacgcagcaatctcccgccctggcgcgcggtccgcgcaccagccaggagcggatacactatttgctggcgcgttttttaacctccgccttctcgctgaagctggaggatttagcagatgaatggtttgtcagccgtgcgacgttgcagaacgacatggcggacgtgcgcgagcatttgctgcgttatcatctgacgctggaaacgcgtccgcgtcatggcatgaaattgtttggcggagagatggcgattcgcgcctgtctgaccgaccttttatggacgctggcgcagcaggagccctctcatccgttaattgttagtaccacgctgaacaccgaggtgtctcaacggctgcggtctcttttgccggatattttctctcattgtcaaatccgcctgaccgatgagggcgagctgtttctgcgtttatactgcgcggtggcggtacggcgtattcgcgaggggtatccgttatcggaatgcgtggcagaggaggtcgatgaaaaggtgcgccatgcggcgcatgagattgcggagctactacaacagctggctgacaagccgctgtcggagccggaagtaagctggctgaaggtgcatattgccgcccgccaggtacaggagattgcccccagcgccattaatgccgatgatgaagaggcgctggtgcactatatcctcaattttattaatacccagtacaactataacctgttgaatgataaacagcttcacgcggacttgctgacccacatcaaaacgatgatcacccgcgtgcgctaccagatcatgatccccaacccactactggaaaatattaagcagcactatccgatggcgtgggatatgacgttggcggcgatatcgagttggggaaaatacacgccgtataccattagcgaaaacgaaatcggttttctggtgctgcatattggcgttgggctggaacgtagttacaacattggctaccagcggcagccgcaggtactgctggtgtgcgatgctggtaatgcgatggtgcggatgattgaagcggtactggcgcggaaatacccgcagattgagattgccctcactctgacactacgcgactatgaggcgcgggacagtattgtggaggattttgtgatttccacggcgcggatcggcgaaaaagataagccggtcatcatgatcgccccctttcctaccgactatcaattggagcagatcggtaagctggtgctggtggacagaacccgtccgtggatgctggataaatatttcgatgcctcgcattttcgcatcgtggagggggaaatagatcaacagacgctgtttaaaacgctgtgcgatcagttgcacgaggaaggctttgttgatgcggcgtttctcgattcggttattgaacgtgaagctatcgtcagtacgttattaggcgacgggattgccttgccgcacgcgctggggctgctggcgaagaaaacggtggtttatacggtgctcgcgccgcaggggattgcctggggtgacgaaacggcgcacgttatttttttactcgccatcagcaaaagtgagtatgaagaggcgatggccatctacgatattttcgtcactttcctgcgcgaacgcgccatgacgcgcctatgcgcatgtcagaattttacgcaatttaaaacggtcgcgatggagtgcgtgagtcgtttttgagaggcgttatccagaattcgatgtaatgcgaatgtaatgctaaactgcattacacattcgattctactggaggcataatggccacgctgaacgtccgtctggatgacaaactcaaaaatgaggcttatgccgtgctggaaaaactgaacattactccaacggaagccgtgcgattactgttccagtacgtcgcggaaacggggcgcatgccagtgaaaaccgtcactcttagcgacagtgaagatgcattgattcagacagttcgggagaggctgtctagtccgcaaaagggaatcaaggttagtctggatgacttatgaactggaattcgacccgagggccttaaaagagtggcataagctgggcgatacggtgaaggctcagcttaagaaaaagttggctgatgtgctattgaaccccagaatcgactctgcccgtttaaacggtcttcctgactgctataaaattaagcttaaatcgtccggttatcgtctggtgtaccaggttcgggatgacgttgtgattgtgtttgttgttgcggtcggcaagcgagaacattcagccgtctatcacgatgcaaacaaacggctttagcgatcaacgcaaatgatgcactacctggttgctgctaccgcgccagataagcgccgggtctttcagatcctgcacaaatttgccatcgaccagcacgttgatgagatcgactacctgcatctgtgcggcgttgagttcatcgagcttgtagccggtccacacccagatatctttccccgggcactccgcgtggatgcgttgtaccagtgccaggatatccggtacgttttgcggatgcagcggatcgccgcccgacagcgagatcccctgacggtgaatgcgcgtgtcgttcagatcggcaatgatcttatcttccatctctttggtaaacggctggccggagttcagccgccaggtgcttttgttatagcagccagggcattcatgcacgcaccctgacacaaacagggtgcagcgggtgccggggccgttaacgatgtctacggggtagtattggtggtagcgcatagcgggtgtccagaaagcatgtaggccggataaggtgcttgcaccgcatccggcaacattgtgatgcctgatgacgacgcgattgcgtcttatcaggcctacggtctttgcaaacggaaattaacctatctgcccattgcctaaatgcttcacgcggcgcttcacttcttcctgcttaccggcgttaaacggacgcgcgtccgggctgcctaaataaccgcacacgcggcgggtgaccgagacgcgcgcggcgtcgtggttgccgcatttcgggcaggtgaaacctttactggtacattcgaactccccggtaaagccgcactcgtagcattcatcgatcggcgtgttggtgccgtaatacggtacatgctgatagctgtaatcccagacatcttccagcgctttcaggttgtgctgaatgttcgggtattcgccgtagcaaatgaaacccccgttcgccagcggcggatacggcgcttcgaaatcgattttgtcgtacgggttgaccttcttctccacgtcgaggtggaagctgttggtgtagtaacctttatcggttacgcccggcaccacgccgaactcggcggtatccagacggcagaagcggtcacagaggttttcacttggcgtgctgtacaggctaaagccgtagccggtctcgtctttccactgatccacggcctggcgcagacgctccacaatcgcgatgcctttagcgcgaagttgctcgctgtcgtacaggtgttcgccgccgaacagcgcgttaatggtttcatggataccaatgtagcccagagagatggacgcacgaccatttttaaagatttcagacacgtcgtcgtccgctttcagccgcacgccgcaggcgccttccatatacaggataggcgcgacgcgggctttcacgccttcaaggcgggcgatacgggtcatcagcgccttccgcgccagcgccagacgttcatccagcagtttccagaatgcggtttcgtcgccttttgcttccagcgcgatgcgcggcaggttaaggctaatcacgcccaggttgttacgcccgtcgtggatctgctcgccgttttcgttctcccacacgccgaggaagctgcggcagcccattggcgttttgaacgaaccggtgactttgaccacctgatcgtagttgaggatgtccggatacatgcgcttgctcgcgcactccagcgccagttgtttaatgtcgtagttcggatcgccaaacttgtggttcaaaccatcgcggatagcgaagaccagtttcgggaacacggcggttttgcgatttttacccagaccggcgatacggttacgcaaaatagacgcctggatcagacgcgactcccaactggtgccgaggccaaaaccaaaggtaacgaaaggcgtctggccgttagcggtgtgcagcgtgttaacttcgtattccagcgactggaaggcgtcgtagcactctttttcggtgcgagaacgcgcatacccttcggcatccgggatctgccactcatcggcggttttgcggtgcttgttgtagctttcggtgacaaacggcgccagcacttcgtcgatacggttaatggtggtgccgccataaatatggctggcgacctgcgcgataatctgcgcggtaacggcagtggcggtagagattgatttcggcggttcgatctcggcgttacccatcttaaagccctgggtcaacatgcctttcaggtcgatcaacatacagttgaacatcgggaagaacggcgaatagtcgagatcgtgatagtggatatcgccgcgctcatgcgcttgtactacgtcacgcggcaacaggtgctggcgggcatagtgtttggcgacaatcccggccagcaaatcgcgctgggtgggaatgactttactgtctttgttggcgttttcattgagcaacgcggagttagtttgctctaccaggccgcgaatttcctggttcagacgaccacgcttttcacgctgaatgtcgcgatcgtgacggtattcgatgtaggcgcgggcaagctgtttgtacgggccggacatcagttggttttcaaccgcagtttggatctcgttaatatccacctgactgcgcgcgttcatttggctgctaacgacttctgcgacggtggcacagtaatctgcgtcatcgactcccgctgctttagctgcacgtagaatggcttccttaatgcgctctgatttgaatggcactttacagccatctcgtttcatcacatgcggtgtcatgatcactccatatttgtaagaacaggttatccacagaggccggggaagccataacaggtttattcatctcttttccaacgacttcccgcaatcctgacccaggttatccacaattcaccttgtgtcgagtgaacaggtgttgtagcaattgtagtcaattaatacaacatattgggtcggtgtgcattttaaagtctatatgtagtgatttgcatcaaggatgtttgcaattttattgatgtagaacaaggtaaaaatcagagcgtacagatggcgggcgctgtagcgtttgtaaaagatagcaagaaaaatctgattaattattcaacaaaaacagtcagtaacctggagcaacgccacagcctgtgtcaataggtttgtggcgtttatccgtataaggatgtcgcgttagcgttgtaaccaccagatggcttcaaatgggcggagcgtcatcgcggctggctggctggcgacctcgccataattatgcagtagcgcctgccactgtcctttgatatgcggcggatgccactcctggcactggttactcagattggcgacaaccagcaggatttgcccctgccactggcggcgataacaccatactgatgggctatccgggaggagatcctgataatcgccccagatcagtacaggctgggttttacgtagcgcaatcagcttttgataggtgtaaaacaccgagttttcatcgcgtaatgccgcctcgacgttaacctccgtatagttatcgcacaggcttatccacggctcgccttgggtgaaaccggcgtttttaccgttgtcccattgcatcggcgtgcggctgttgtcgcgggatttactggccagaatagccagcagttcgtcggggtcgcgcccggcggcgcgtagcgcggcaaacatgttatggctttccacgtcgcgataatcggtgatgcgggtaaagtgtgggttggtcatgccgatttcttcgccctgatagatataaggcgtcccttgcataccgtgcagcgccatcgccaacattttcgcggctggaacccggtattcaccctcgtcgccaaagcgggaaacgatgcgcggctgatcgtgattacaccagaataacgcgttccaggcgacgttatgcatcccctgttgccagtggcggaacaacgctttcagcgccacataatcaggttttgccagcgtccacttttcgccattggggtaatccaccttcagatgatgaaaattgaaggtcatcgagagttcgtcgccgctaagcgcggcatattgctggcagttttccagcgtggtagaggacatttcgcctaccgtcatcagattacgcggcgtaaaaacgtcacggttcatttcgcgtaaaaacgtatgcgcgcgcggcccgtcggtataaaagcggcgtccgtcgcccgtcggatcgtcaggaaaattctgatctttggcgatcaggttcaccacgtccagacgcaggccatccacgccgcgatcggcccagaattcgcagacctttttcagctcggcgcgtacggcggggttttcccagttcaggtcggcctgttcaggcgcgaaaaggtgtaaataatattgttcgctctggctatgccagcgccaggcgctgccgccaaatttggattgccagttattcgggcagacatccggcgtgccatcgcgccagatataaaactgacggtatggactctctttgttcagcgcttcgcgaaaccaggcgtgctgggtagaagtatggttaaacaccatatccaggatgatacgaataccgcgtgctttcgcctgcgcgaccagctcgtcaaaatcatccagcgtgccgtaggtcgggtcgatagccgtataatttgcgacgtcataaccgttatccacctgcggcgagatataaaacggcgtgagccagatggcgtccacgccgagtcgctgtagatagtcaaggcgctgcgtgacgccgcgtaaatcgccggtgccgctgccggtcgtgtcctgaaaactttttgggtagatctgataaataacgccgttttgccaccagaggggaatagtcattgttgtttcctgcaagtgcgttgggacgcaactgcgccccggagaagtattagacaatttgtaatgtgccctgacgatgcttacgctgatagataaaggtggtcagaatcaccgggatcacgatcgcgataaccatcgccatgccgtacacctgccagtagcgcggcggtatagacaggatgcccggcaggccgcccacgccgataccgttggcgatgacgccgttcagaccgcagagcagtcccgccagaccagatccgatcatcgcgcacagcatcggaaaacgatacttcaggttgataccgtacatcgccggttcagttaccccaaggtaagcggaaatggcggcaggaacggagatctcgcgttcattgtgtttacggctggagatgatgatgcccaccacggcggaggcctgcgcgatattcgacagcgcaatcagcggccagactggcgtaccgcccatgctctggatcatctgcatatcgatagcgagcgttgtctggtggacaccggtaatgaccagcggggcatacaggaagccgaacagcgccgcgcctatcggggcgaaactgccggtcatcagataacgtaccgcaaaggccacgccgtcgccgatcatacgaccaaaggggccgataaaggtgtgggcgagaaagacggccagtattaacgaacacaccgggacgacgaccaggtagagataatccggcacgatgcgtttcaaccgcgtttcaataaatccaagcgccagccctgccagtagcgccgggataacctgcgcctggtagcccactttctcaatgctaaataagccgaagttccagacgtccggcgtttgctggcccagcagatacgcattcatcaactgcggcgacaccagcgtcacgccgagcacgataccaagaatcggcgtgccgcccattttttcaccgccgaccagcagattcccaccggcagatagaaaaagatcgcttcgccgatcaaccataaaaaatcataaagcgtttttagcgccggatgcatctgcgccagcgtttggccgttgctcatcggcacatcgccgatcacgttacgaaagcctaagatcaaaccgccgctgatcaacgccggtagtagcggaaagaagatctccgcaaagtgggaaattaactgctcatgccatttcatgttctggcgagcggcttttttggcctgctctttatcagcatacgctttgccggtggtctccagcagcgcgttatagtaatcgccaacgtcggtgccaatcaccacctgaaactgaccagcgttggtgaaacaacctttaaccatcggtaattgttcgatctcttttggcctggcgttcgcgggctggtggagcacaaagcgcaggcgagtaatgcagtggctcaccgtggcgatgttgtcgcgcccgccgaccaggtcaatcagccggtcgatatcggcttgttttactttgctcatcgtaaagcctcatggcagaggagatatgttatgggttggcgcaagagtagctcttcaacgttggtttaaaaatgggaacgttcccgaaacgcagcgacgatcacaaattactcgtggtattccgtttaattagtcactcaggcgagggtagaaggaatgacgatccggcgcggatcgcagcggccattgatctgttcgatcagctgcgaagccgcctgtcgtccggcttcagcatagccaggatcgacagtgacgatctccgggtgcaggaattttatcagcggcgtgttcccgacgcttgccagttgcagcgtctcaatacgttgctcctgtaaatacttactggcgcccaacgccagcgtatcggtggcgcagactaacgcggtggtatccggcatgatgacgcttgccgtatgctcatagccctgcttcatggcaagaccgggcagggcggcgacggggtgaagtttatgttttttgcaaaacgccaggtatgcgtcatgccgacgtttgccggtggtaatatcgctatggggaacgcccagaaagctaatgttgcggtgtccctgctcatacagccgctgcataaggatatgaatcgcgccctcgtcgtcgtaacagacggaggcaaaaccttgcgcatctcttgccagcagcaccagcgaggctttccagggggcgatcaactcttctgtgatgccggtaaagccaaacagcaccacgccatcaatgttacgtcgtctgagcatgcccagatgttccattaccagcgtcggcgagaactgactttccatcataatagggtcgtagccctgttcgtaaaacgcaggcagcatggtctgaaccgcgaggttttcagacaacgaatcaaggcgagtgacgataatagcgaccactttatcgctttgtccccgcatcgcgcgggcggagcgggacggggagaaaccgtgttgattcatcaccgcttcgacacgctcgcgggtacgttcgcttacgccgctttcattgttaagcacgcgggaaacggttgatttccctacgccgctcaggcgggcgatgtctttgatagtgagccggttttgcatcctgttttcccgtggcgtgacgctgatggtgataaaaagagtaactttactcaagcgaagggcaatgggcaaagtctggtttatcgttggtttaattacgtaacggtatgataccgccataattgccacaaaacttatggatttatgcgtataatccgcggcgcaaattatttacttaccggaggcgacatggaccctgaacccacccctctcccgcgatggagaattttccttttccggtaagcctgcctctgctgtcttaccggtgtgtaagacagtgacacaataacgtccctgtttttatttaaacattgctcatcgggcaaggctttgccgtgcctgaagaattttctgcgcctgacttcggcgcggagggattacctatgctaaaaatcattacccgccagctttttgcccggcttaatcgtcatttgccttatcgtctggttcaccgcgatccgctgcccggcgcgcagaccgcggtaaatgcgactatcccgccttcgctgagcgagcgctgtctgaaagtcgcggcaatggagcaggagactctctggcgcgtttttgatacgcacccggagggattaaacgctgccgaggtgacgcgcgcgcgtgaaaagcatggcgaaaaccgccttccggcacagaaaccctcgccgtggtgggtgcatctgtgggtatgttatcgcaatcctttcaacatcttactcacgattcttggcggcatttcttatgccacggaggatctgtttgccgcaggcgttatcgccctgatggtcggtatctcaacgctgctgaattttgtgcaggaagcgcgctcgacaaaagcggcggacgcgctaaaagcgatggtgagcaataccgctaccgtactgcgggttattaatgaaaatggcgaaaatgcctggctggaattacccatcgatcaactggtgcccggcgatattattaagctggcggcgggggatatgatcccggcggatttacggattatccaggcgcgcgatctgtttgtcgcccaggcgtcgctgaccggcgaatctctgccagtcgagaaagtcgccgcgacgcgtgagccccggcaaaataacccgcttgagtgcgacacgctgtgctttatggggacgaacgtcgtgagcggaacggcgcaggccgtggtgatggcgaccggcgccggcacctggtttggtcaattggcggggcgcgtgtcggaacaagataacgagcagaacgctttccagaaaggaattagccgcgtcagtatgttgctgatccgctttatgctggtcatggcgccggtagtactgattattaatggttacacgaaaggtgactggtgggaagcggcgctatttgcgctctcggtcgcggtagggctcaccccggaaatgttgccgatgatcgtcacctccaccctcgcgcgcggggcggtgaagctctcgaaacagaaagttatcgtgaagcaccttgatgcgattcagaacttcggcgcgatggatattctgtgcactgataaaaccggcactctgacgcaggataaaattgtgctggagaatcacacggatatttctggtaagcccagcgagcatgtactgcattgcgcctggctgaacagccattatcagaccggtctaaaaaatttactggatacggcggtcctggagggagtagacgaaaccgccgcgcgtcagctctccggacgctggcagaaaatcgatgagatcccgtttgattttgagcgtcgccggatgtcggtagtggtcgccgaagattcgaacgtgcatcaactggtctgcaaaggcgcgttacaggagatcctgaacgtgtgtactcaggtgcgccacaacggcgatattgtgccgctggacgacaatatgctgcgccgggtgaaacgcgttaccgacacgctgaaccgtcaggggctacgcgtggtcgccgtcgcgaccaaatacctgcctgcgcgtgagggcgattaccaacgtatcgatgagtctgacctcattctggaagggtatatcgcttttctcgatccgccgaaagagaccaccgcgccggcgctgaaagcgctgaaggcgagcggaattacggtgaaaattctcaccggcgacagcgagctggtagcggcgaaagtttgccatgaggttgggctggatgcgggcgatgtcattattggcagtgatattgaagggttaagcgacgacgcgctggcggcgctggccgcccgtacgacgttgtttgcgcgtctgacgccgatgcataaagagcgcatcgtcactttactcaaacgcgaggggcatgtggtcggttttatgggcgacgggattaacgatgctccggcgttgcgggcggcggatattggtatctcggtagatggcgcggtggacatcgcccgtgaagcggccgatattatcctgctggaaaagagcctgatggtgctggaagaaggcgtcattgaaggtcgtcgtactttttctaatatgttgaaatatatcaagatgacggccagctcaaatttcggtaacgtgtttagcgtactggtggcgagcgcctttttgccgttcctgccaatgctgccgctgcacttgctgattcaaaacctactgtacgatgtatcccaggtggcgattccgtttgataatgtcgatgaagaacaaattcaaaagccgcagcgctggaatccggcggatttggggcgctttatggtctttttcggtccgatcagctcgattttcgacattttgaccttttgtctgatgtggtgggtatttcatgcgaatacgccagaaacgcaaactttgttccagtccggctggtttgtggtgggattactgtcgcaaacgctgattgtgcatatgatccgtacccgccgtctgccgtttattcaaagtcgcgccgcttggccgctgatggcgatgacattgttggtgatggtggtgggagtctcgttgccgttttcgccgctggcgtcttacctgcagttgcaggcgctgccgttaagctatttcccgtggctgattgccattctggtgggatatatgacgttaacccagttggtgaaagggttttacagcagacgttatggctggcagtaaacactttcgtcggggattcgccagcgtgcttaatccccgatatcgctaaccaggccagatgcccgtaaagctcgacaagtttaacgcgatcggctttatctttaaatttcagggcttattcaagcaactgtagaatgctatatgcaggcataaaaaagaggaatgtccagctaagtttgtaaaatacattctctgcccccgagccagaacgagaggaggagatgtcccaccgccggatatgttttgcggatatgcgacgaaagcggcgaatatagctaatgcaataaactaagtaaggaggaatcgctaaggcggcagtgggtttaggaaacataagggtaagcaatatggctgcgacaatgaagcataaaaagactatcttcgcggtagattctatctgttttaattcctggcgtatgctttcagcatgtttctcctgccagcgacggagcgtgctgttgctaaatccatattcttcgcacaacgccttattcggtacgccgtttttcgactgttgcagaaaatcggcgatttgttcctcggtaaaacgcgatcttaccattgccgcctctccatggctgttggtgccccgaaccgggcaaacttgcgccgcccggcggggatgacgtccggcgcttagcgacgaacagcgatcgcttcaatctcaattttcacgtctttcggcagacgggcaacttccacgcaggaacgcgccgggaaggtggcgttgtgctcggtgaagaaggcttcgtaggtggcgttgacggtcgcgaaatcgttcaggtctttcacgaatacggtcgttttcacaatgtcgcctactttcaggccagcggcttccacgatagctttaacgttttccagcgactgacgtgcctgagcggatacgtcttccgctacggcaccggttttcggatcgaccgggatctgaccggaagtgattaccatgctacccaggtcaacgccctgtacgtatgggccgattgctgctggtgcattttccgtcgcaatagttttgctcatgatttctcctgaattacagcggtaatagaatgtccccgctcattatagggagccgggatctcataaccaacccaaattagttggccagcaccacataatgcgaaaactctttttcacagtatttgcatttgagggcgatatcattggcgcgttttttcactgcaaagctggaggatactggttccgcgtggctgatgcagttgctgttcgggcaaaccagcacattattaatacgctctggcaggctggggcgtgatttcccgactacgtcgtagttgtcgatgcggttaacggtggcctgcggcgcgtacagagcaagttggttaacctgctcttcggtgagaaaggtgttttctattttgattaagtctttacgccccatctcgccagacgggagattcagaccgatagtgattcgctgatcggtctcggtcaatttaaacagactcagcagtttaaagcctacctgcgcagggatatggtcaatcacggtgccgcatttaatggcttcaacctgcagtttgttatcgtgtgtcatcgtttttctcccttacagactcagttcgctattcagtactaacgccagtaacgcctggcgagcgaaaataccgttgcccgcctgttggaagtaccaggcgtgtggcgttttatccacatccgtggtgatttcatcaatccgcggcagcgggtgcagcactttcatattttcacgcgcgccgttcaggtcgctggcgcgcagaacaaactgcgccttcacattggcgtactccgacgggtcgagacgctctttctgtacgcgagtcatatagaggatgtcgacgtcggccatgacctcttcaatagaaccatgcaggctccaggccatccctttttcatccagcatatccagaatgtactgcggcatcgccagcgcgtccggcgcgataaaataaaaacggttgccgctaaatttcgccagcgcctgggttagcgaatgcacggtgcggccatatttcagatcgccgaccatcgcgatatgcaagttatccagacggccctgcgtttcctggatggtgaacagatccaacagggtctgtgtcggatgctggttcgaaccgtcgcccgcattgagcaccggcacctgaccggaaaactccgtcgccagacgtgccgcgccttcttgcggatggcgcatcacaatcgcgtccacgtaagtgctaatcactgagatcgtgtcggctaacgtttctccttttttccccagcgacgtgttggcgctgtcggagaagcccactacgctggcgcccaggcgatgcattgaagtttcaaacgacaggcgggtacgcgtggaggcttcgaaaaagcagctggcgatcactttatgtttcaaaagctccggctgcgggttggcttttaatttcgccgccgtcgccagtaccagattaagatcgtcgcggctgaggtcgtttatggaaatgatatgtttttgatatagcgggttagccatgtttatctcctgacgcctgggcaaaaaaaaacccctcaattgaggggcttggtattggttttcaacggaaagaaaaacggcaggcctgcgtcttttttcagacgcggtaagacagaatgtcgtacacactgaaccatgcttcctcccggcaaattgtccgcgattatactcagctctgttttgggatcaagcgattaatgcatgatttactcatcgcaaacggttcttatgaatttaaattcattttaagcaaataattaatttgtttgtgtaccagcgccgtgcgctgaacgacccgtggtgcgacccagacaatactgctaccggcaacgacgccgagaatttccggcaatgcgtggtaatccagaattctcgcgacggcgcgaccataacctgccgccgtatggataaggataaattcgctattatgttcaacgctaacgaccatttcggctattgaacgtccggcatccggcgaaggtcgccgctggggatttacggaataaatcttttgtcccttcgtatttctgatttttattgcgcccagcagcttgagcaggcgcgaaaccgtagactggctgataccttcaaatccctcattttgtaaatcgcggcgaatctcctcctgggacaggtaacttttttcactaatcaggcgctgacaaaccgccagttgctgttgttctttggcggagtaatcatcgtattccttcataaatgcaccttatctttattattgatatcaacggactggcgaaattcatcacatttgtcacatcgattgcggatcaatcgggcggttttgcaggaaaatgagaagccgatcaaaaaaggtgacggcgtgcctgatggcgctgtgcttatcagtcctgtcagataagacgcgtcgccatctggctcgttacatcatcgctccgatgctcagtaccgccatattcagcaatgtcaggatcagcaacagcggggcgacccatttcagatagcggacatagggaacccgcgcgatcgccagaccgcccatgaccacggcggaggtgggcgtaaccaggttcacaatcccggaggccgactggtaggcggttacgaccaaatcccgctgtacgtgggcaaaatccgctaacggcgccataatgggcattgtcaatacggcaagaccggaagaggagggcaccaggaaggagagcaatacttccagccagtaggttacgtttatgaaaatagtggtagagaggccggaaaccagactttccgcgctgtgcaaaatggtgtgggtaatcataccgttatccatgaccaccacaatgccgcgcgcgataccaataattagcgccacgccgagtaaatcccgcgcgccgtcaataaaggtactggtgaacgcttcctcacccatccgcgttatcacgccaacgataatcgccgccgccagaaagacgccggagatttccgccatccaccagccgagaaccgccacgccgtaaatcatcaccgcgaaagaggcggcgaagatcatcagcacccatttccgggtagccgtaaactccagcagagtattggctcgattgccgaggaaatgggcgcggttttcctccattttatctgccacgatagaaagctcaggatgggcgcggactttgcgcgcatagcgcattacccaaaacacgcacagtacgtagccgacaattaacagcagtactcgcatcagcattccctgagtaaaagggatgccggcggcgttggcggcaatgaccgtggcgaaagggttaatggtcgaaccgagcgtgcctatccccgcgccgagcagtacggttgccgcggccactaacggatcgaagcgggccgccatcataaccggcaccagcagcgtgtagaagggcaacgactcctccgccatgccatagatagtgccgcctgcggcgaacagcgccatcagaatggggatcatccactcatctttgccgttgagtttgatagttacccgttcaataccggcatcaatcgcccccgttttattcaccacccccagaaagccgccgataatcaagacaaacagcgcgacgtcaatggcgccggcggtgtaggtttcgtggttatagaggccgtcaatcggcgccagtaaaacagcggtaatcccttgcggatgcgcgtccacgggggcatacgttcccgccaccggcacctcttttcccagcgtggcgttcatcgccatttggtattttcccgccggcacaatccaggtcatcactgcgaccagggcaataagaataaacaggatggtataagcggtgggaaatttaaatttacccatgatgttctctcctgatatcacggatatgcgccgcgagggcgcatatcctgtgggattagtcgccgagcgtcgccaccatgactgctttgatggtgtgcatccggttttccgcttcatcgaagactatcgagcctgcggactcgaacacctcttccgtgacctccagtcctttcaggccgtaagccatttcgatttcgcgtcccactttggtgtgctcgttatggaaggcgggcaggcagtgcataaacttcacatcaggattaccggtagcgtttaccacctgctggttgacctgatatggcgtcatcagactgacgcgctccgcccaggcttctttgggttctcccatcgagacccagacgtcggtatagaggaaatccacaccgtgaacgccgtcttcaacgctctccgttaaggtgatacgagcgccggtaacgctggcgatttctcggcactgcgcgaccagcgcggcatcaggccagaaggactttggcgctatcagacggatatccatgcccatcttcgccgcgcccaccatcagcgaattgcccatgttgttgcgcgcgtcgcccaggtaggcgaagctcagttccggcagcgttttgcccggcgcatgttccagcatggtcatcagatcggccaggatctgtgtggggtgaaattcatcggtcaggccgttccagacgggaacgcccgcgtattcccccagctcttccacaatgtgttgaccaaatccgcgatattcgatgccgtcatacatccgccccaggacgcgagcagtatctttcatggactctttatggccgatctgcgagccgcttgggccgagataagtcacctgcgcgccctggtcgaacgcggcgacttcaaacgcgcatcgggtgcgagtagaggttttttcaaaaatcagcgcgatgtttttgccgatcagtgtttgcttttcgcatccggctttttttgcggctttcagctcaatagccagatcgatgaggtgttggatttccgccggggtgtagtcaagcagcttcaaaaagttacgatttttcagtgaaataaccattacaatatccttgttaaaatgaattgcctgatggcgctgcgcttatccggcccacggttatgcgcgctctgtaggccgaataaggcggaagccgccatccggtaaaaagccttatgcgtcaacgtcggcggtttcacaccgaatcaaagtacctttctcgcccgcgagaatggcttgcccatccgccagcgagccgattccggcaatgccgcggcaatggctgacaaactcagcgcaggcggtcactttcgggcccatcgaaccggcgtcgaactgcatttcacgaagcagctccggcgtaacctgcgccagcgggcgttgggtgggcttgccccagtcgagatacaccgcgtcggcatcggtcagaatgagcagcgcgtcggcgtgaatttggctggcaagcagggcggcggacagatctttgtcgatcaccgcctcgataccgtggtagccatcggctttttccacgaccggcacgccgccgccgccgttacagataaccaggtgatcgcggctaatcagcgcgcggatggcatcgttttccacaatgcgtttcggctgcggggagggcacaacgcggcggaaggcgttaccgtcggctttgaatacccagcccttttctgcctgtaacgcacgggcctgcgcttcgtcgtaaatcggtccgatatatttggttggattgaggaatgccgggtcgttggcatcgacttcgacctgggtgagcaggacgctgatttcacgctccggcagatgattcttcagcgcctgttgcagcatgtagccaatcatgccctggctttccgcaccgagaatatcgagcgggtagggtgtaacgttagcgtaggcgctattttgtagcgccagcagtcctacctgtgggccgttgccgtgcactaacaccacgcgccattgccgcgtaagctgggcgatggttctggccgccagttcgatatttttacgctgaatatcagcctccagcggttcgccgcgtttgagcagcgcattgccgcccagcgcgacgaccagtgtgcgtttgttttccataacgtctcctttaaataccatcgcgttccagtggacagctcatgcagcgtgcgcccccgcgcccgcgacccagttcatcgccgggaatgggaaggacggtaatgccggctttgtcgtatttttcgttggtccagatgttgcgctcatagcccaccaccacgcctggacgcagggtgagcacgttattggcgtcattccactgttcgcgctcagcttcaaatgcgtcgccgccagtggtgattaagcgcacctgatcgatgccaagcgctgtttcaagagcatgaaccagcgtgctctcctgggttcgtttcagaccgccgcgtccgtctggcgtcagcgtccagcactgaacgtccgggcgaacgacttccggatagacggagaaggtgtcgatatcaatgtgggtcatgacggtgtcaaggtgcatacaggagcgatgttttggcagttcaacggcaatgacgcgttccgcctgacgatgtttaaacaatgcctgcgccaggaactcgacgccctgcggcgtagtacgttcagacataccgatcaacaccgcgccgcggccaatcaccagcacatcgccgccctctaaagtggcgtggtcgtaattaatgtcctcgtcgccgaaatatttaatgaaatcaccgcctgcgaattgaggatgccagcgataaatggcacgtaaattattcgtttcacgttggcgtgcaggtttcgccatggggttaattgagacgccgttatatatccagcaggacgtgtcacgggtaaataggtgattcggtaatggcttcataataaagtcattaatatcgtgagtatcgaccaccatattttttatggaggcgggaatttcgccgtaagttaaaccgccgcttaaatggcgagccagttcacggtgcggcatatccgccagccaggcgcgaatatctgcggcaaaggtgggcccaaggcgataatcggaaatttgcgtatccagtagccaggctttagcgtcagccacatccagcgtttgggtgagcaggtcggttaacagcaacacttctatcccttgctggcgcagcgtgttggcaaaaatgtcatgctcttcgccagcgcgctctacggataatacatcgtcaaaaagtaattcctgacaatttgaaggggtaagtctttttaggctgagattgggccgatgcaacattacgctgcgtaattgaccgatttcagaaccgacaaaatgcttttccatcattataccttttacataattacaagaataaagaaggagtggctgcaaatatttagcgtgcttgcagtcgcggcgtttcagttaaattcgggagcaatgattgaattttatttgggttgttaatgtgatgagattcacatcaatcaaggagtgctatttttcttacttaatatatgaaccgggtcagagaaattcaaaaaacaataaggcattaaatgaattactacgcagctatatggtttgttatttttctattgttaattatttgtttgctgtattgaatgatatttaaatcttaactcattgaaaataaagtgattatttttaatggttgcataactatgcgtgagggggattttattatcggggatatttaaataatttaaaaataactatggatagagaagtcatttatgcagggagagcgaattgtgatcgctaaaacgtttttatgttaacgcctttaatatcaaagcattgttagtgatggcaatttggcgccgctggggtttatgcataggcactgcataaagttgggcgaactattaacaatatagaaacaccgctggcgataaacatgcgctggcgcaaaatcgatgagagtaagggtagtatggcagccatttttctcgtataaagagaaaaataaaacgctgttttaactaaggggatgcgatgattattggcaatattgaacatctggaggtctggctgccgacggcgttacggcaggcgattgagcacgtcaatgcgcatgtcacgacaacgaccgcgccaggtaagtatgacattgacggcgacaggctgttttatatgatttctgaaaatatgacggagccgggcgaatcgcgcagcgcagagtatcacgctcgttatcttgatattcagattgtgctacaaggtcaggaagggatggcattcagtacccggcctgcgggaacgccgcacacggactggctggcggataaagacattgcatttttaccgacgagcgtcgacgagaaaaccgtcgtcctgaacgaaggcgactttgtggtgttttatcccggcgaagtgcataagcccctgtgcgcggtgggagaaccggcgcgggtacgtaaagcggttgtgaaaatgctgatggcgtaatattttgtgccggatggcggcgcctgcacgttgcgatcttgtaggccaaccgccatccggcatcatcacgacattatttagacagcgtcgctaccattactgctttgatggtatgcattcggttttccgcttcatcaaagacaatgctggccgcagactcaaaaacctcgtcggtcacttccatcccgccatgtaaaccgtactcttcggccatttttttgccgagcgtggtttcgtcatcatggaacgcaggcagacaatgcaggaacttaacctgcggattgccggttaaggccatcatctggctgttgacctgataatcacgcagcagggcaatacgctccgcccatttctctttgggttcgcccatagagacccaaacatcggtatagataaaatccgcgccttttacgcccgaggcgatatcttcggtcagggttatggcgccgccgttctttttcgccatggcgctgcactccgccactaacgcggcttgcggccagcaggcttttggcgcgaccagacggagatccaatcctgttaacgcggcggcttccagcatggagttacccatgttattacgcgcgtcgccggcatagaccaacgtcatctcgttaaaggctttacccggcagatgttcctgcatggtaagcagatccgccagtaattgcgttgggtgatactcatcggttaaaccgttccataccggcacaccggaatattcagccagcgtttcgacgatctcctggccatatcctcgatactgaataccgtcaaacatccggcccaggacgcgggcagtatctttgatggactctttatggccgatctggctcccgctggaacccaggtacgtcacgcgcgccccctgatcgtatgcggcaacttcgaaagagcatcgtgtccgggtcgagtctttttcgaagatgagcgcaatattcttacccaccagcttttgttcttctttaccgtttttcttatcggctttcagtttggcggcaagctgcaacagagcagtgagctcgctggcggtgaaatcaagtaactttaaaaaaggtttttggtaaaacgtagacatacttccctcacatggcttaggcctctcattgaattaaaattcactttatatggatgattattcatttgcaactctgtttgataaaacttttctcgataaggtggaggcaacgtcggcggtatgtgacaataagagtatcggcaggacatctatgaggaacgagctatggcaaacccggaattactggaagagcagcgtgaagaaacgcgcttaattattgaagagttacttgaggacggcagcgatccggatgcgctgtacactatcgagcatcacctttccgctgacgatttcgaaacgttggaaaaagccgcggtagaagcctttaaactcggctatgaagtgacggagccggaagagctggaagtggaagagggcgatacggttatttgttgcgacatcctcagcgagtgcgcgttgaacgccgaactcatcgacgctcaggttgagcaactgatgaacctggcggaaaaatatgatgttgaatacgacggctggggaacctatttcgaagaccctaatggcgaagagggtgatgacgacgattatgtcgatgaagatgacgacggcgtgcgtcactaaagctgcatagtatgacggtacggcagcgtctgctgtcgtatttttttaacaggttacgtatgaattacccgcaaatactctctccggtgcttaatttcctgcattgcccgacgccgcaggcgtggattgtccaggcccgcgatccgcaaaatcttcctcttctgcttaccgatcacctgatctgcgaactgaaggctgcgcaaaccgcgttgctgttggtgcgtaaatatgtcgccgataaatcgggcgccgacgcgctgctctcctggctgcaaccttacgaggcgttcgcgtttcgtcaggggccggagccggattttgttgccctgcataaacagattagcaaaagcgccatgccgcaaactgatgacccctggggacgtcagcttatcgaccgtatggtgttattgattaaagaggagttgcaccatttttggcaggtacgcgaggtcatgcaggccagaaacattccttatgtgaaaatcaccgccagccgctacgcgaaaggaatgttgaaagcggtacgcacgcacgaaccgctcaccttaattgataagctgatttgcggggcgtatatcgaagcccgctcctgcgaacgttttgccgctctggcgccctggctggatgaggatttacagacgttttatctctcgcttctgcgctccgaagcacggcattatcaggattacctggcgctggcgcagcagatttccgccgaggacatttctgcgcgcgtgcgctattttggcgaggtagaagctgaccttatcttgtcgccagaccgcgagtttcgttttcatagcggcgtgccagccgccggataaagggtaaaattaaagattagcgtttttatcttttacgctgtcgccacctgcgtggtcatccgcccgacatcaaactgctggcgagcagaaaaagtcattttcatgatattctgtcctgagtaaagcctgccctgcggcaggcaaaaagaactcactcagtgttatattcccgaaaggtgaccgtgaacaatgccatttttgcatcatcactacgggttcttgtgttgaaatacttactgtttcacgccttttgacgcttcagagcaggtcttgccaacaaaggtttgtttaattttgttgatggaggttgttttattacctcctgcatcgacatccgatttcatggtcatcgcaaattctgtatcgcttattttcgtcgtttctacaatagagtgcgatttgacatcaggattattacagacagtctcattgatcagtttggtatccgtactttctacaaatgttgtcgtgcaaccgcctgcactggtagaaaaacccttcaccatttttttagaatcttcagacattttaggggtataacacataagcgtcgctatgcccgaatttttttcatccattaatacttcttttgtatctggattgatggtgcgcatttctatattttccattttccattcgccgggctgtatatctaatgcatatacattagagatactaataaacatagcggggaaaacaattgctgataataggcgtttcatttataacttccttgaataataagtgattcccggataacaggatgtttccgggattatttatatcagcaaaaataatacctggcgaggataaataaacgcctggttttcagagatcctttaacatcctcacttcgcaatcgacatgtccggtgcagccgagcggttcgctaatatgttcaaatcctaaacgttcgtatagcgcaatcgcctcgcgtaaaaaagccgttgtttccagatagcagcgtttaaaaccctgttcacgggcatgatccagcgccatcagcgccagctttttcgccagcccctggccacgaatcaccggtaaaaaatacattttttgcagttcacaaatgtctggttcgctacaggataacggcgccacgccgccgccgcccaccacacaaccgttttgctctaccacccagtaggccgcgcccggttggctataaacctgatacagttcatccagattggggtcggcaacggtataacctttatcggcggtaagtccgtattccgctgaaacctgacggatgacacgggcaatagcggcattgtcggcggtagtgattcggcgcaccgtgagcgttggcgaggcgacattattcataatatggctcaatttttaaaatttatttatagattactttaataccaccgtcttgagttacgcgcaaggagatcctgaatcagacaaaataaaaggcggaaaaattaaacaaaaatagtatcgtagtcaaatcagtaacagtttactggtttttattattaattctaatagattgtaattcagggatatgattcatgaataacgttatcagtagtaaagataaccataatcacacgttggtgtttacaggcaagggcggaaagtattttgttatttgccttgtgaatttcttgttgacgtgtatcacgttgggaatctatgcgccgtgggcgatggtgaaatgtcgacgttatatttatactaacatgacgctaaacaatcagccttttgcttacaaagccacgggcggcgcattatttattagtgtgttgttagtttttattatttatattgttagcctctctcttattgaacacggtcatcccggtctcggttttacgctattcggcttattaattgcgattattccttttatggcggtgaaaggattacagtatcaggcgatgatgacttcgcttaatggcgtacattttggattccagtgttccatgcggcgcgcctggtggtacatgttcgctcttcctgtactcctgatggtggcgctttatattgttctttatattatctcactggtaaccatcgccgtcggcggtttagtgttcagtatcgtttttctcggtttgctggctattattgggataggggtcattaacggtattacctacagcaaatggatgaccttgtttggtaatggcgcaaactttggcattcatcgtttctcgattcaggttaatgttaaaacgtgcatcagagggtgcgtgttggcaatgttgacccttttcccttttgctgtcgtgattggttatctaatcgcgccggtgttcaccgacatgattcttttgagtatgatggggaatgcgcaggcaggaggggcgcttattctgcaatattatggccagataatggcatgttatttcctctattttctcgcgattattgtggtaaccagttacttatatgtggcgttacgcaacctgtttttaaacaatttgtcactggcgaacgattcgattcgttttcattcctctgtcactgcacacggtatgctgtggcggttactggtggtgtttgtgatttccggcgtgaccttagggctggcttatccgtggttgaaaatttggctggtgagctggctggcgcagaatacacaggtccagggcgatctggattcgcttgagttaaccaatgatgagaagccgctggaaaacagcccgctaatgtggatttctcgtggcattatgccttacttcccgtttatctgatgtaaaaaggccgacgtttacgtcggcccataattcatgttgtcggatggcggcgtgaatgccttatccggcctaccgatcgcgccatgtcaataagcgaacgtgtaggcctggtaagcgaagcgccatcaggctttcagattacagcgcgctaataaccgcctgctgctcaatcagtttcgctttggcttctgcgtaaccgtccagcttctcacgctctttggcaatcaccgcttccggcgcacgggcgacgaaaccttcgttggacagtttgccttcgatacgggcaatctcgccttcgattttcgccacttctttcgccagacgcgccagctcatcgtctttgttgatgaggcctgccatcgggatcagcagttcggcgccgtcgatgattttggtcacggaaaccggacctttgtcatcggctggcagcacggtgatgctttccagacgcgccagggtttgcaggaagctacggttgtcgttaacacgacgaacggcttcttcactacagccgcgcagcagcagttccagcggtttgcccggggcgatgttcatttccgcacgaatgttacgtaccgcgacgatcgcctgcttcagccactcggtatcggccagcgcggcttcatccacctgtgcggcgttatattccgggaacggctgcagcataatggtatcggcggtaatgccacagataaccttcacgcgctgccagatggtttcggtgatgaacggaatgatcggatgcgccaggcgcagcagaccttccagtacggtgaccagcgtatggcgggtgccacgcagttcagactcggaacccccggtcattaccggcttggtcagctccagataccagtcgcagaactggttccaggtgaactcgtacaggatgcccgcggcgatatcgaagcggaagctgtccagcgcgtcgcggtacgctttaacggtctggttgaattccgccaggatccaacggtcagccagcgacagcgtcatttcgccgccgttgaagccgcaatcctgctcttcggtgttcatcagcacaaagcggctggcgttccacagcttgttacagaagttacggtaaccttccagacgcttcatatcccagttgatgtcgcggccggtcgaggccagcgccgccagggtaaagcgcagggcgtcggtgccgtgcggctcaatgccgttcgggaactgcttctcggtacgcttgcgaattttctccgccatctgcggctgcatcatgttgccggtgcgtttttccagcagttccggcagggagatgccgtccaccatatccagcgggtcgataacgttacccttggatttggacatcttctggccttcgtcgtcgcgaatcagaccggtcatgtagacggtatggaacggcacctgcggcttgccgttttcatctttgatgaagtgcatggtcatcatgatcatgcgggcaatccagaagaagatgatatcgaagccggacaccatcacgctggtggggtggaactgacgcagggcgtcggtgttttccggccagccgagggtggagaaagtccacagcgcggaggagaaccaggtatcgagaacgtcttcgtcctgacgaagcgcaacgtcggcgccgaggttattttcctgacgcacttcgtcttcggtacggccaacgtagacgttgccgtcgttgtcataccatgccgggatacggtgaccccaccacagctgacgagagatacaccagtcctgaatatcgcgcatccaggagaagtacatgttttcgtactgcttcggcacgaactgaatgtcgccgttctcaaccgcttccaccgccggtttcgccagcacgtcagcacggacgtaccactggtcggtcagcatcggttcgataaccacgccgccacggtcgccgtaagggacagtcagatcgtgcggtttaatttcttccagcaggcccagcgcgtcaacggcagcaacgactgctttacgggcagcaaagcgttccagcttctggaactcagccggaatctcgctggaataaacgtcagactcttcacctttggtatcgaacacttccgcgctttcgcggatgtcgccgtcaaaggtcaggatgttgatcatcggcagggcatgacgtttcccgacctcatagtcgttaaagtcgtgcgccggggtgatcttcacgcagccggtgcctttttccatatcggcgtgttcgtcgccaacaatcggaatgcggcggttaaccagcggcagaataacgaatttaccgataagactctggtagcgcggatcttccgggttcacggccacgccggtatcgccgagaatagtttccgggcgggtggtggcgacaaccagataatctttaccgtctgcggttttcgcgccgtcggccagcggatagcggatgtgccacatcgagcctttggactcgcggttttccacttccaggtcagagatggcggtgcgcagtttcgggtcccagttcaccaggcgtttgccacggtaaatcaggtcttctttgtacaggcgaacaaagacttctttcacggcattggaaaggccttcgtccatggtgaagcgctcgcgctcccagtcaacggagttgccgagacggcgcatttggcgggtaatggtgccgccggattccgctttccactgccagattttgtcgataaacgcatcgcggccgtagtcgtgacgggttttaccttcttcagcggcaatcttgcgctcaaccaccatctgggtggcgatcccggcgtggtcggtgccgacctgccacagggtgtttttaccctgcatacgctggtaacggatcatggtatccatgatggtttgctggaaagcatgtcccatatgcaaactgccggtgacgttcggcggcgggatcatgatgcagaaggactctttgctttcgtcgccgttaggcttgaaatagccctgcttttcccagtgctcgtaaagcggctgttcgatatcttgggggttatatgtcttttccattatttccaggttgccgtattcaggttaaaaccagccacgcggtaggctttgtagcgttcgcgcgccagttgtttcaaagtttcttcgtaagggacgaagtctaccacttctgtgaaagcggtggcaaaatctgcaaagcttgtacgcaggctgattaaaatatcgcgcgggctgctgttgcgtttttgcggccaggcgatttcaaccggcgcgccgccgcgtgggccttcgcctgccagattgtgcgggacaaaactttccgccggtcttgcccacagcgcttcatccagccgaatggcctgcttctcatcttcgcaggcgatcagcacgcgcttgcccgcgcgccaacgttctgcggcaatttcacacaccagttgttcaacggcgcttaaaccgttgacggtggtgtcattatccagaagatagaacgtcgcatttttcatatatggggcttcttgtggtggatttaaatgcgttgtcatgatgcctcccgtaggccggataagcgcagcgccatccggcaaaacgcctgatggcggcgctaatgcgccttatcaggcctacggggtaatctcaaacttactcttcgccgttaaagcccgcacgattgagcaggaactgcgacagcagcgctaccggacgacccgtcgcgcctttcgctttgccggaacgccaggcggtaccggcgatatccaggtgcgcccagttgtacttacgggtaaagcgcgacaggaagcagcccgcggtgatagcgccgccaggacgaccaccaatgttcgccatatccgcaaagttggactccagttgttcctggaactcatcgcccagcggcagacgccacgcgcggtcgcccgcttgctcggacgcgccgatcagttcatgcgccagcgggttatggttcgacatcagaccggtaatgtgatggcccagcgcaatcacgcaggcgccggttagcgtcgcgacgtcaatgaccgcttccggttcgaagcgctcaacgtaggtcagcacgtcgcacaaaaccagacggccttcggcatcggtattcagcacttcaaccgtctgaccggacatggtggtcagcacgtcgcccggacgatacgcgcgtccgcccggcatgttttcacagcccgccagtacgccgataacgttaatcggaagctgaagctcggcgaccatacgcatcacgccgtaaaccgccgccgcgccgcacatgtcgtacttcatctcgtccatcccttcagatggcttgatggagatgccgccggagtcgaaggtcaggcccttacccaccagcacgatcgggcgcgcgtcttcggacggattgcccttgtactcaatcaccgacatcagcgattcattctgcgaaccgtggccgaccgccagataagcgttcatacccagttcgcgcatttgctgttcgccgatcacgcgggtaatgacatttttgctgtagctgtcggccaactggcgcgcctgtgacgccaggtaggcggcgttacagatattgggcggcatgttgccgagatctttcgcagccttaatcccggcggcgatggccagaccgtgctgaatggcgcgttcgccgctggtgagctcacggcgggtcggcacattaaagaccatcttacgtagcgggcggcgcggctcgctcttgttggtcttgagttgatcaaagctataaagcgtctctttggccgtttcgacggcctgacgcactttccagtagttgttgcggcctttgacgtgcagttcggtcaggaaacagacggcttccatcgaaccggtatcattcagagtatttatcgttttctgaataacctgcttatactgacgttcatcaagctcgcgctctttgccgcaaccaatgaggaggattcgctcggaaagaacgttaggaacatggtgcagcaacagagtctgccccggttttccttccagttcgccgcgacgcagcaatgcgctgatgtatccgtcgctaattttgtcgagctgttctgcaatcggagaaaggcgacgcggttcaaagacgcccacgacaatgcaggcactccgctgtttctccgggctaccgctttttacactgaactccatgcactatgctcctgaatcttaaagacaacagtggtggctacagctatactcgtcgtctttcaagttgcagatgcgttggctgcgcctgctcacccctgtcgcttacctgatgtaagctccggggcttcacagtcttgccgcctgcctgcaactcgaaatccattagagtatagaaattgaaagctttcgtaactcatatccgctgttgcggtgacttcgtgttaatcttaacgttattacggcattggcacgtcagaacaagttctgagaggtgaatccgctgagtataatgatcttagcgatgatttcgacgactcaagagaataaatgacgtttaagccatgaaacaagctaaattccagcaaaaaaatgggtttttacgggcgtatttaaagtgataatcataagatatctggtgcgggagacgctcaaaagccagctggcgatactcttcatcttacttttgatcttcttttgtcaaaagttagtgaggattctcggcgcggcggttgacggcgatattcccgcaaatctggtgctctcgcttctggggctgggcgtaccggaaatggcgcagctcatcctgcctttaagcctgttcctggggctgctgatgacgctgggcaaactgtataccgaaagtgaaattacggtcatgcacgcctgtgggttgagcaaagccgtgctggtaaaggccgccatggtactggcgttatttaccggtatccttgcggcggttaacgtgatgtgggccggcccctggtcgtcaaaacaccaggatgaagtactggcggaggcgaaagcgaaccccggtatggcggcgttggcgcagggacaattccagcaggcgaccaacggcaactcggtgctgttcatcgaaagcgttgacggcagcgacttccacgatgttttcctggcgcaaattcgccctaagggcaatgctcgtccttctgtagtcgtggccgattccggacaccttactcagttgcgcgatggttcccaggttgtcaccttaaacaaagggacgcgttttgaagggacggcgttgctacgcgattttcgcatcaccgacttccagaactatcaggcaattattggccatcaggccgtggcgctggacccgaacgatactgaccagatggacatgcgcacgctgtggaataccgacaacgatcgcgctcgcgccgagctgcactggcgtatcacgttagtctttaccgtatttatgatggcgctgatggtcgtgccgctcagcgtggtgaatccacgtcaggggcgtgtcttgtctatgttgcccgccatgctgctttatctgctgttcttcctgatccagacctccattaaatcgaatggcggtaaaggcaaactggacccggttatctggatgtgggcggtcaacctgatctatctggcgttggcgattggtttaaacctgtgggatacggtgccggtccgccgcctgcgtgcccgttttctgcgtaaaggagcggtataatgcagccatttggtgtacttgaccgctatatcggtaaaaccatttttaccaccatcatgatgacgttgttcatgctggtgtcgctctccgggatcatcaagtttgtcgatcagctgaaaaaagcggggcagggtaactacgacgcgctgggcgcgggtatgtacaccctgctcagcgtacctaaggatatccagatcttctttcctatggcggcgctgcttggcgcgctgctgggactggggatgctggcgcagcgtagcgaactggtggtgatgcaggcatcgggtttcacccgtatgcaggtggcgctgtcggtgatgaaaacggctatccccctggtgctgttaaccatggcgatcggcgaatgggtcgccccgcagggcgagcagatggcgcgtaactatcgtgcgcaggcgatgtatggcggttcgctgctttccacccagcaaggtctgtgggcgaaagacgggaataactttgtctatattgaacgggtgaagggcgacgaggagctggccggcattagtatttacgctttcaacgatcagcgtcgtttgcagtcagtgcgttacgccgcttcggcaaaattcgacccggagcataaggtctggcgtttgtcgcaggtggatgagtccgatctgcaaaacccgaaacagatcaccggttcgcagacggtgagcggcacctggaaaacgaatctgacgccggataagttaggcgtggtggcgctggacccggatgcgctttccatcagcggtctgcataactacgttaaatatctgaagtcgagcggacaggacgccggacgttatcagctcaatatgtggagtaaaatcttccagccgctctccgtggcggtgatgatgctgatggcgctgtcgtttatctttggaccgctgcgtagtgtgccgatgggcgtgcgcgtggtgacggggattagcttcggcttcgtcttttacgttctcgaccagatttttggcccgctgacgctggtatacggcattccgccgattgtcggcgcgctgctgccgagcgcgtctttcttcctgattagcctctggctaatgctgcgtaagtcgtaatcacagtaatcgtaggcctgatggcgctgcgcttatcaggcctaccatgacccgtaggcctgataagtcctttccgccgccatccggcagaccgcctggtattcctcgaatgatgtagtgcgtaacctgacgcgtggcgcttttggctacgcgttaagctcaggcaagctgcgggaaaaagtagaacaaaaaatttataacgtgctgccgtgataaatctgataacccaaatcaatcgtattatggttgagatcgttatttttaattttgttgagcaacatctgcgcggctctgcgcccgatctcaaaacgaggggtaattacgctggcgaggctcggtatcatttgcctgcccatctccagaccgtggaagccggcgatggagatctgctccggtacggccagttgacgctcgcggcaccacagtagagcgcccattgcgatatcgtcatttgtacaaaagacgccatccacgtccgggtgcgcagtaagcgcatcacgcattagctgtatccccagatggatagaggagatagcgcgtggattgatgcgcaacggcgccagcccccggcgcgtcatcgcatcgcagtagccgtgataacgctgctcatctcggatatcgtcttttgaacccagatagaggatttttcgccgctggcgtttatccagcatggtgctgaccatatcaaaggcggcctgacggttatcaaaccccacctccatatctaagcgatcgccctggatgtccatgagttctacaatcggaagggtagctgagcgcaggaatttgacggttctgagggtatgatatttttctgaaagaataatgccgtcgatattgtaagacagtaaattgataacggactcttcttccgaatcgcgattgtaattgtaattcgcaatgagagtttggtagttatgacccgacgttacggattcaatcccggcaagaatgtcggcaaacaactggttctggaaagaggggatcagcacgcccagagtgtaactttgcgcgtttaacagcatagctggcgcgcgatttggtatgtagttaatttcctccatgatctgcgcaatacgctcgccggtttccctggcgacttttttcggcgagcggatgtaacggctcaccgtcatttttgtcacgccagcaagcgtagcgatatcctgcaaagaaattctgtgattcctcatgttttctccagtaccggaggcgggaacgtcgcccccatggttaattgggctgcggatgatgaattaatgcagaaccgcattcagcgccagtacgcccagcaaccccatgacagaaatcaatgtttccataacggtccaggtgcgtagggtttccccgacgctaagattaaaataccctttaaacagccaaaaaccgggatcgttaacatgtgatgcaataacgcttcccgcgcctgtcgccagtaccattaacgccggatcggcgtgggttacgttaataatcggcaatacgacgcccgctgtggttatcgcagccacggtcgcggaacctaacgcaatacgcagcacggcggctaccgtccagcacattaataacggagatagcgaggtgccggtcattaattgcgagatatattgacccacgccgctatccaccagcacttgcttaaacgcgccgccgcccgcgatgataaaaacaatcatcgcaatagcgccaatggactcgccgacgatatccatcacctgctcaaccgtacgtccgttgcgtcggcccagcgtaaaaatggcgatgataatggcaataaacaacgccactgctggattaccgataaattcgaagaaaacccgcacggcattcgtttttggcagcgtgatttcacataccgctgcgatggccatcagaatgaccgggatcacggcggcaaaaatactgttccagaatgacggcatctcctcttcactgaataggtgaggattaaataatccttcaggcggcgctttctcaaagcgcgccagcaattttgaaaacagagggccggcaacaatcacggtcggtatggtaatgattaacccatacagcagggtcgtaccgagatttgcctcaaaaattgtcgcaatagcagtagggccgggatgcggcggcaggaagcagtgcgtaacggataaggcggcgaccattggaaccccgacatacagcaagggcagtcccgatgaggccacaatcgtaaaaacgagcggcaacagcagtacgaatccgacttcaaaaaacattgccaggccgacgataagcccggtgatcaccagcgcccattgcacgcgttttttgccgaacgtattaatgagcgtcgtcgcaatgcgctgcgcggcgccggtatcggaaattaatcttcccagcatcgcgccaaaaccgaggatcatggcgagtccgcccagagtaccgccaattccgttttgtatggagtgcaggacgtcttgcgcgcccatcccttcggcaaatcccaccacggcggcaaccagaacaagggcgataaagccgttaactttaaagccaatcattaaaaccaacagcagcgcaacgcctgccgcaataattattaatggcatattcgtctctcttattagcgccaaaatagcagcgcttacgcgctgcgtcgtatttccctggtcagacggcaaccagcataccgccatcgacaaacagcagatgtccgttaacaaagtcggaggcttttgacgagagaaacaccgctgcgccaataagctcctggggatcgccccagcgtgcggcaggcgtacgtttgcatagccaggaggtgaaggcttcatcttcaaccagcgctttggtcatctccgttttgaagtaccccggcgcaataccgttgacctggatattatgacgcgccagctccacgcacatgccgcgagtcagcatcttcacggcacccttcgacgcggcgtatggcgtaatcgtgtcgcggcccagctcgctttgcatcgaacagatgttgatcacttttcctgcctgccgcgccaccatacggcgcgtaacggcctgagagacgagaaaaaccgcggtctgatttacggcgatgacgtcattccactcctgttcgggaaactcagtaaacggatgacggcgctggataccggcgttatttatcaggacgtcaatgacgccgatatctttttcgatatgttcaaccgcagcttcaatatcctgtttatgggtgacattaaaaggagcggcaatagcctttatcccttcctgctgaagtttcgtcacggctgtttcggcgcgctccggggtgatatcgttaacaataatgcgcgcgccatagcgaccaagaccggtcgccagcaaataaccaattccctgagcggctccggtgataaggatatttttacctgccagtgaaaaaagatcgttcatgatagtgtcccttattttactttctcagaaaacgagctgaacttttgccgcctgtgttttgtctccggcaaagatcagcgccgcttccaggtcggtaaatggatattccgcgctcagtaacggcagcggattgataacgcggttggcaagccaggaaaccgcagtattaaattcggtagtaaagcggaaagagcctttcagggagatctctttgcttattaccatcatcatcgggaagttgggaactgcgccgcccatgccaacctgcaccatcacgcctttggcccgtgtgacttccagacacgttgagatagaggaaggatgcccagagacttcaaaactgatatcgaaataccctttttctgctttccagtcatcgagagaatcatgctgtgggttcaccagcgtatccgcgcccatctgccgggccagcgagagagaacgggtactgatatcggcacataccacttccgccgcgcccagcgtttttaccgcgctaacaatcaggcagccgatagggccaacgccggagataaagatgcgtttgccctgcagatcgcccgcctcatgagctgcatgaatggcaaccgccagcggctcggcaaaggccatggctttttcgtccgcctgttccggccagggaatgcactgagcggtatcgacagctttaaatcgggtaaaaccgccatcgacatgcggaaaatacatggcgctgccaaagaaacgcatttcagtacagtggttttcttcatgctgcagacagtatttgcaatgaccgcaaggctccgatggattaattgctaccggttgtccttcacgtaataaatctgagtcgctatgaacgattttgccaatcacttcatgacctaaaatcattggcgcttttactgtaaaattgccgactttgccttcctgataataatgtaagtcagacccacaaatgccgccacgggtaatttgtacgagagttcctttattattccattcaatattttgttccgtaacggcaacagcacgcttacccgcaacaacgcaggattgagtttttacttccataaattcctcactggtcaggtagttaccctgaacgcatttaagcggttttatttgtcactatttgtgacttatgtcacgctggaaaattgttacactacaatgttacgcataacgtgatgtgccttagagttcttctctatggaaattaaaaaacgtgaaattgtcgaacgtagaggcgtaatattgtgttgtggaatatgactcagaggtatttaaatggccggggaaagctatattttaatgggtgtttcaggtagtggtaagtctttaataggcagcaaaattgcaacattattttctgcgaagtttattgacggcgatgatctccatccggcgaaaaacattgataaaatgtctcagggaataccgttaactgatgaagaccgcttaccctggctggaacgattaaatgacgcttcatacagtctttataaaaaaaatgagacgggatttattgtttgctcgtcattaaaaaaacagtaccgcgatattttacgtaagagtagccctaacgtacatttcctgtggctggatggcgattacgctactattctgcagcgaatgcagcgtcgtgccgggcattttatgccgccagacctgctgcaaagtcagtttgatgcgctggagcgaccctgtgccgatgaacatgatattgcgcgtatcgatgttaatcatgacatcgagcacgtgacggagcagtgccgactggctgtacaggcttttcgtcaggcactcagcgcttcctgatcattgtcaaagcgctgagtcaggcggtcagaagtcagcttttagcactacacgatagcgggctttgccgtcgcgaacgtgctggatagcctcgttgatttgtgacattgcgaacagttccgtggtgggcgcgactttactgcgtccggcgaatttcatcagtttgcgaagttcatatggcgttccggttgccgagcctgagatactgcgatcgccggcaattaatgtaaacgccggtacgggcagcggcttcaataccgccccaacggtatggaagttgccgccataggtcagcgcttcgaagtagggttgccagtcgagatcgacgttaaccgtgttaataatgagatcgaactgacccgccagtgcttttaacgcttccggatcgcggctgttcaccacgttattggcccccatcgccagcacttcctgctccttcgatggatttgagctgaacgcggtgacttcgcagcccatcgcgtgtaacagctttatggcgatatgccccagcccgccaataccgatgacgccaacgcggctggtagcagtaatatggtgcatcaatagcggtttaaagaccgtaatgccgccacataacagcgggcctgcggacgccatatctatattctccggaagaggaattacccactgccagcctgcgcgaagcttctcggcaaaaccgccacgattgaggatagtgggcactgcgccttcctggcagttaatttgattgccgctgatacaggcatcgcagtgtccgcagctgcgcgccgtccagccgattccaacgcgctggccgacttttagccccttatcctgtgccgcgctgccgagtgcggccacccgaccgatgacctcatgtccggcaaccagagggtattgagagaacccccattcattgtcgatcattgacagatcggaatggcagatcccgcagtagtcgacccgtacctcgacatcttccggttggagttctcccgcgtcatattcatagagttcgagctcgccgcccgcctctttggcggcatagctttttattatcgtcattgtgtttcccttaatgtggtgttgaactgaaaagtgtagagcatggaggcaagggacgcccggcgttaatctgctggagaaggcgggaagtagcctgattattctatttaatactcaacgctgctgaaattttcagcacttagcgatacaggtgtatgctcgtgcttgcatggtggcgtatgacaggtataatccacaacgttttccgcatacctcttcagtgccgaagtggcgaaatcggtagacgcagttgattcaaaatcaaccgtagaaatacgtgccggttcgagtccggccttcggcaccaagtgatgcaataattagctgcctaatggtggctttttttgtgtccatttccgtccaaattcgtccatatccatctgtaattcaaagataatttatttttctgtaatagatatatttattttgtggtctttccgtgttggtcgtttttcatccattaacatccacgcgatctgggggcaaaaaggggcaaacccggttcgatagaggagtgccccccaaatggcgcttacagatctcgcaatccggcatgccaggctgcctggcaaggcatacaggctctttgactgccacggtttttacattcaggtgaaccccagcggatccaagctgtggtatctgaaatttcgctttggaaacaaaaagaaccgtatggcattaggcccttatccgctcatttctcttgcactggcaagggagaagcaagcggatataagaaggcttattttagaaggtattaatccggcggaaaaacgcagagaggacaagcggggtggcgagcctctttaatacgttcgagtccgtagtgcgcaaatgcgtctccagcaacgtgaactggtcgacggaacattcgacagcgttattttctgagcttacaggttttccaatattgcactgaacgctatccagtcgggttcacgggcttctggagcgagctgcgcagccgataatcctctactgcttcagttataacgctattatgtgacatgcagcatgatatggtcgttttctgaactccgtataacctgagtatttgtattgaagcgtgaacaaaacattgcagccagcctttcaacgtggacaatagttattcatacggtgattttatattcgataaatcaatgggtttcattgaaacataggactggtaatggatgacaatgctttagggtttgcctcatactggcgcaattcgctggcagatgctgagtcaggaaagggcagttttgaacgcaaagacgccaaaaatttcacccactggcatgggatagcggcgggacgtcttgacgaaacgatcgttggtaaattttttgagggagaaaaagacgacgtcgaaacagtcgatgtcatcttgcggccaaaggtttatttccggttactgcagcgtggaaaggaccattccgctggtgcgcctgatattgttaccccgatagtgacgccagccctattgagccgtgaaggttttttatatccgacgccagcgacctccattcccagagacctgcttgaacctttgccaaaaggggcattttcaattggtgagattgagcagtacgacaaatacaaaacgacacatacgtcattctctatcaactttgatgaccgcgttgataagaccgccgaaacagatgaagaacgagaagcacgatatgcagcctggcagcaggattggcgtcaatatctggatgattcagaaaggctgctgaagaacgttgtcggcgactggattaaaaatcctgagcaatatgaactcgctgagcacggttatattgttaaaacggcgcaatctggcggcgccagtttccatatcctttcactttatgatcacctgcttgtttgcaaaaaggatgtgccgctcttcaatcgtttcgcctcgcgagaggttcatgctgcagagtcattacttcctccggaagcaaaattcagcgacaggattggacactccggggataagtttccgctggcaaaggctcagcgcgatgccttaagccattttctggatgcgaggcatggcgatatccttgccgttaatggtcccccgggaaccggaaaaaccacgctggtgctttctatcatcgccacgcagtgggcccgagcggctctcgaaaaagcggaacctccggttattatcgcgacttcaacgaataaccaagctgtaacgaacattatcgaggcgttcgggaaagatttttcccaaggcactggtgcaatggccggacgatggttgccggagctgaaaagcttcggcgcttattttccctcaagcactcgtaaagccgaggccgccaaaaaatatcaaactgaagatttcttcaaccaggttgagtcaaaagagtatgtagaggatgcactgctgttttatctggagaaagctaaggcagcctttcctgaaaaagagtgttcatcccctgaaaaggttattgaactcctgcatggtcagttggcagcaaaatccgagcaactggtaagactgaacgcaacatggcaaacgttaagccaggttcgggcaacgcgagagcttattgataacgacattgagcaatatctcgataatttaaataaattactctccgggcaagaacaaaaagttactcaactaaaaagtgctaaagcggaatggaaaaaatatcgggccagtgaatcactgatctatccattattttcatggctaccagtggttcgcagtaagcggcagtaccaaatacaactgtttctcgaagataaattaggtgcgctgattgcgggaaatcaatggtcggatcctgaaaccatcgaacgtaatatcgataggttgcttaattccgccgagcgcgagcaaacaacctaccggcagcagattgactccgcgcatgaaatcgttcttaaagaacagcaggcggctcaggaatggcagaggctggcacttgatttagggcatgagggcgacgaggaactgagcttctcacaggcagatgagctggctgatacgcagattcgcttccctgcattcttactgacgacccactactgggaaggtcgttggttgatggatatggccggcattgatgatctgcagaaagaaaagggcaagaaaggtgctaaaggggtaacagctcgctggcaacgccgaatgaaacttaccccatgcgtggtcatgacctgctatatgctgcccggcaatatgcagataagtgaacataaagggcagcgtaaattcgagaaaagctatttatatgacttcgccgatttactcattgtcgatgaagctgggcaggtgcttcctgaagtggctgctgcctcgtttgccttagctaaaaaggcattagtgattggtgatacggaacagatcccgccaatatggagtattactcctgctattgatataggtaacatgctggcggaaaaaattctgtcaggcagtacgcaagaggagattactgagaaatatacggcaatcgcagagcttggtaaaagcgccgcatctggcagcgtcatgaaaatagcgcagtgtgcctcacgctatcaatatgatcccgaactggctcgtggaatgtacttatatgaacaccgccggtgcttcgataatattattggatactgcaatacgctctgctatcacggtaagttgttgcctaaaagagggtgtgaagagagcaatttaatgccagcaatgggttatctccatattgatggtaaaggagagctggcaagtagcggaagtcgatataatttgctggaggctgaaacgatagcggcctggctgacagataaccagcaaagtattgaagcgcattatggtaaatcgcttcatgaagttgtcggtatcgtgacgccttttagtgcgcaggtaccgaccatcaaacaggcgctggataaacaaggcatcagcgcaggcaccaatgaaacgtcgctcacggtgggcacagtccattctcttcagggcgctgaaagagcgattgttatattctcgccagtctattcaaagcatgaagacggcgcgtttattgatagcgataacagcatgctgaatgttgctgtctcccgagctaaggacagtttcctggtcttcggcgatatggacctgtttgagattcagccagcctcatctccgcggggattactggcaaaatatctctttgagtcagagaagaatgcgctcacttttgattataaagagcgtaaggatttaaaaactgccgagaccaaaatctacacactccatggtgtggagcagcatgataatttcctgaatcagacgtttgaaaataccgataaacacatcacgatagtttctccatggctaacctggcaaaaactggagcaaaccggttttcttgattccatgattacggcgtgttcacgtggtattaacgtcacggtagtcactgacagaagctacaacactgaacataatgattttgagaagcgaaaagagaagcagcagaaccttaaagcggcgctggagaaactgaacgcccttggtattgcgacaaaactggtcaatcgtgttcatagcaaaattgttattggtgatgatggtttgctgtgcgtgggatcgttcaactggtttagcgcgacacgtgaagcgcgatatgaacgatacgatacatcgatggtttattgcggtgataacctgaagggtgagattgaggctatttataatagtcttgataggcgtcaggtttagggcaggagtgtgattagccatcttatcagtgtttccccagggtaagatggctgtgaggcattttcagaaggaatcattgtggcgactaaaatgtggatgatccgcggtgatggcggaaaattgtacgatgacttcagagacaagcaggttgttgctatcggctggtcgcagctcgctccctatgtgaaaccgggatgctcaagagagcagttgtttacccggtatcaggagcttgagccacagactaagtcaggcacagttcgttccggtgcttcgcaggtctggcgctttgtgaacgagatgcagaaaggtgactgggctatcacttattcaccttctaatcggacttatttgatagggaaaatcgcctcagattttgagtttcatgccgagtggcttgaagatggcatgggcatcgcccgtaaagtgaagtggaacgcggaagagattaagcgtgatagtctgagtgatgcaaccagaaacacccttggctcaacgctgacggtttttcaggtgcctgattttgccgtgaatgaattagtgcagggcaaaaagcctgtctcagatgtcgtgccggaagtacctgtttcaggtgaagaggatgaggttgtttctaatcctctgcgtgacatggaaatgattgcctttgaaggcatcaaagatcgtatcaaccgtctcgactgggatgagatgcaaaatctggtcgcaggcgtgttacgcagcatgggatataaaacccaggtatcgcctgcgggtgctgaccgcgaaaaagacatcattgcttcgcctgacggttttggcttcgaaaatccgcgcatcattgttgaggtgaagcaccgacgggaacagatgagcagccagcaaatccgtagctttatcggtggccgtcataaagacgatcgcgggttgtatgtcagcacaggcggattcagcaaggatgcgcgctatgaggccgatcgctctacaatcccgttgacgctatggacgctggacgatttagtacgtgcgttagtggaaaactatgagcaggtggatattgaaactaagctgttggttccacttaagaaaacgtacttgcctgcatgaagggaaaccaggggttacagtaatcgtagtgatatttagactaatatgaattttaactaaaataacgacgatattgattttatcgaggagtttgacccactcctcgatatatttagtttactcccaacgccttataaaccgcatctacaggttcagagtaaaaactgacctggaatttggtaaacaactcggctggcacagtcggaatatctaccgcggaagacatcggcaaaaggacctttttcgcgccactatcgaaagcaagttgtaagctagccgccagatcctgaaccgggttgatcacaccaccgagcgtcatgctacctaacacgaccatttgttcctgaacgggtttcgccagtaaaacggaacacagcgcgatcagcgcggcaagactggtcgcggtacttggtccagtattgtgcaattcgactacgtgcaggtggtactcatgttcagaaaatttcgctgttgcgctaacgcggctgaggttgcctttgaaatagtcaaatccaacccggatggcttccttagccgaggtgcttgatcccagaccagaaacgctatgcttaccattgcctgcggtcatctgagtttcgaagcgatacagacccgtcatgccactttccgcttgcgtaaccaaatgcactacaccaggtttgggcatgccagcaggaattaattcgctgccaccctgttccggcacgctgacgaagaattcttccagcgtctcgttatcaatgtagctgaaatttacatcgaagaactccagaccgcccagctttttaagctgttctttgacgcgacggcgagcttccatggcgtaggtcaggcaaacacggacatcttctttgctgtaagaaccattggggtgaagaagtttcagtagaccagaaaccgtgcgccttaccgcgataacgtcgcgctggttgaggttattacccagcttatagaacttatcaatcgcgtcggagaagctgcgcttacgcatttcccgcatgtattcggcgagataatctgtgataaggccgtagcgattggtaaagaattccgggcgcattttcggaatttcccagccggggatataggcatggaagcggtcgaaaaacgccgtatcgatcatcgcggcagggaagggggctaacagatggctggttttgactagcgtctcaacgctttggttaatgttgccgacgaacaccatcgatgctttgccttcaatcgaatctcttccgcgggaaaacgagccagacgccatgtaatccttcatgatttgcacgccgtctttgtctttgaaagtgatccccgccacttcatcaaacgcgacgacatcccacatgccaaccaggccaatctggcggctggccatgttgtaaaacaggttggctaccgtggtttgcccgccggaaactaacagtgagtttggcgaacattctttatagacgtggcttttaccggtgccgcgtggacccagttcgcagacgttatagttgttttccacgaaagggatcatgcgggtgatcaggtgccacttggttcgctgctcaatgttagcgggttccatacccacggaacgtagcaggacatcaatccactggtcgcggttgaagtgcgtacgtgcggtaaatacctcttccatgtccatattgggcatctggataggtttaagcgtcatcagagagaagggcgacgttttttgtccttcctcaaagaagtagttcacggtgatcatgcaccagatgccgccggtcaacagcttctcgttgtccttgaccatctgcggcggaaccagtgcatctttaatgccgaggttggagagctgggcttcgtaaacgtctttcttctgattgagctttaccgatactttatcaatgatcttgtaggatcctcgctcacgaatgagcgatttcaccttctctgcttcatcagggcggacgtagttatcagccagaatacgcttaacgttctgcaacccttgctcgacgatctggtcatcgtcggaagcgcagtacataccgagcagatactccagcacatagaccgggacatttgccccttctttgagctgtttagtcaggtccttacgtactacccgaccacgaaaatgctgattcagcaaggcgtccagatcgtaaccttctgcgacgagttccccttcggatacagctggaacgggtaagtcatgatgggtttgcatagcgcctcacttaaaagaaatcatcctgaaatgccagatcgataatcacagggtacttctggtaacccgtttccgtttgtgcatcttccagtatcagccagtattcattacggcgattgaaattcgcgccaatcagcttcagcgtcacgtcacgcacgcgtttttccattgtgttgttatcgctgtcaaagcagattcgctctttaccggataccacattattggcgttatcgacgatgaagatgttcagagtacgtggttcgtataactcacctaccggatgggtttgcagcaggctgactttatcaatgttattgacgagtttgatcagcggatgatgcttgacgatgtctaccggacgacgctgaggttgcttctcggcagccgttttctgcagtgctttcacctgcaatacgggaacgcagacttcctgtagcatggcgccaccatggacaaaccgcgcgccgcccgagaaatggaaacgctggatccctttcgggatcaggaactcgctgttatcgctgacgcctgcggtatccgccacttttcctttccagcaaaaatcatcggcaggaagctgatgaccgataataaagcgtttgtggtttttaatcgtattgtctggcttgatctgcagcgtggttttatcctggccggaaaggggctgctgctggaacaggaaaccgtggtccgccgtgacgataatccgtgtaccgtggagacggtttattacacgagtcactaaatccttcagttcaaccaccgcgttacggcacgcttcgaaggtcttctcctccgtcgatgcgctgtcacccatggcatcaatggtgttatgccagatataaacgacttcgtaatcgcgaataagatctcgtccttgctgatttttccatttcagcagatcgtccgattttactgccatccctttatatttcttcagaatggtatcgcggttaggcgtacctgaggtggataacccgtccgcataaacgatgtcaccactacccggttggtagcatatctcgtcatggggcagcaatgccgccattcccagctgggtatagctgggtaacacgcccaactgggaacgcagttcggcagtaaagcgtttctcggtattgatctggttgcccagctcttctgccacttcataacgcagcgcgtcggagataatcacgaatacgcgcttgatttgtggattgttaaactgcggcttaaccacctcattgtagaagttctgctgccgtggtacgcccgcaatacgccactcctgcatacggttttcggtttccagaaccttattccagctccggcttaattctgccaggtaccagttggaatacagcgcttcgatatagtcatccaggcttttcaggatcattgcgcctttgctgtgaaccaacagcgcgtattcgttaaacaggcggtaggcctggtcaaagcggaacagctcctcgcagtacgctttccagaacgttgcgctgtcctgatagtggaaaccatcaatatgacgattacgcagattcagcaaccgttcggcctgacgcagtgcatcgtaaatagcgcagtattcctgacgcgtctggcaccagtatttgctctgacgttcagacagaagcttcttaaaggcttcacggtctagcgtggtgctctcttccagaagctgcgtcaccagcgcatgaatgatggtctgttcaatgctcagcgtggtttcgcactcgtgcagatcatacggcgagctgagacggtactggtcttctggtcgcagcgcatcctgcatctgctgtgcgcaataatcataggcttctttgtagcgacggtcggcgcgccaggtgaccataaaggccagcgcggaggctctgcctgacggcgtggccagcacgtttttttccagccattcgcgtttctgcggatcagcctgcgcggaaagatcggtacagaacagcttgaggatcaggttttccagggtcggatgctcggcctgatagcccatttcctgattcagaatgtcccacagaacgccttccaggtcgtggcgtttcagcatcgccagcgtgttttccaggtcgctgtcgtcatctttctgctgattaacgtattgggtaatcaggctgaacagaatctcttccgtttttgctgtttttacgccagcgatgaccgcaaccatcttcttatcaagagaagcttcgttttcttgctcagtgaccaggcctttcaaggcagaaagacgtttagtgctgaaaaatgccttccggcgttgaatgtgctcgcgtaggccaagctgtggaatacctaatgtattcagcgtaatggcggcgaaatcggcgtggaactccgtactataaagacgaatatccaatagccagtcgaactcttttggggggcatcgtgggggaaccacagcaaaaactgctgttccggctcgtcgatttcaatgcgctttttaaccgccagctgcgactggtcggtcatatcaagcagcgtgacgttttcgagttcgaggttatccagctcttcgaggaaacgcttatcgggatcgtgccagaaaacgatgcgatgttcggcgaattttgctttaaggccggcaataaattcctgattttgcaaggtcacaatcccatttcattccagataaaagttaaatcgtcaggtacgggtaacgtgcggaacagatctttttgacgttgttcacgagcccgctgacccaaaagctgggttagcaaggggtcaattgcctgttcgaaaaacattttaccatgaaagcactgtgttaattgcgtcgttggggagcgtgcggcgatgttagttttttgcgtttgtatctgggctaacaagacatcgggatccagatgctggctccactgccgtaagcattgttcaacttcagcatcattctgtgctgtattaagatcatgaaacgcagtattaaaaccggcagcgcgcagccgttcccaaagaggatggataacattccaaagtgcggcatggttccgccattgaggtaaaacatcatgaacggcctggataaatgcctgtatgccgccattgatcgcctgctgatgttttggctgaaacaccagccaaagttcttccggcgcgatcagataactttcaatacaaaaacgcggaagaaccagtagattagctagatttcgacgcttttcagcgatctgcacgtcagtccatgcgtcacgatcaaccacgcccagccagttggcttcaagggctaacgcctcaagcacatttttcttagaacctgctggtgcaaggatccaatcttgttcccatgccggaaattttctgctgaggaaattctggaaagccgtgacatcatctgtaccttcaaccagcagtacccgtctgccggttgtggccactttttgttctttaatgtcccgaataatttgcttaacgctggccattttccgcatccttgccatcggttaaatcaatccgcaatcccatgttgtcataacgttgccagatatccgttgcgtgtgaagtcatcacaagctgaccatttttcctggcaacgatgttctcaatggatgccagcaacggcgatatcagggacggatgcagatgcagatccggctcatcaatgagtacaacaccgccgggctgtagccagcgttgtaccgtaaacagcataatcagcacctgatgttcgccggagctaagcgcatctaacgaatgatcattccctgaatccagtaggacacgttgccgctgtcctggatgaatttcagcttcgatacgtttaccgctgaagaactggtttagcgtggcgatcatttcaggatattcaccgggcatggttgccttcatattgaagagcgacgattcaagctgacctttccagttatcgttcacttcataggttgccagccaggcttgagttgaatcatccggggacaggctgccgatatctttttgcgggcgaacccagcggcgcgcttcggcatccaggtaaaccagattaggcatatcaacacttggtcccttcagtacaagccgttgatactggctactccagtgactccaccagttcttatagggaagaaaaaagtgttccgatgacgtaaaaacggtcgtctctggcgttgttccctttgttctgcttaccgtttccccgagccagtagacctgtgggtatttctcttttagttgtactaaaaatgcctctgagccaagaaatagccctatttggtcctccgattttggcgaaaaggaatcgagaatcatcgcgcagctggcatcccagcgatagaaccaggtataagattcatctttgatattcaggcgcgtacccgtgcccagccaatgcccaaaggcgcgccataataaggaaatggctcgtaacagcgtcgatttaccgcagccgtttggcccggtaatcaggacattggattctatctcgcctgaccagtcgttttcaaaacgaatttcaccgtcgggcagcggtccgacggattgcgtataaatcgccgctattttcattaaataatctccggtgcattgccggtaatggctttcacatccgccagcagatcgccaaacttaccgtagttaaccttaacgccgtcgtcgagatcaatactgattctcatatcagcatagtggcgcaggcgatcgtcgaagctgcgcagttcgttgaattttttgctcaggctatcacgctcacgtttcagacgggtggcttcgccgcctgaggctccatcgacctgttcgttcaggcgatcgatattggcctgatagcgcgccagcagcggcactacatattcggtacgcattctcgccagcgtcgcatcgttgtagcgatgcagatagaccaggcactcaaacgctttctctttaccggagctgaacagccagtatatcggacgctttttatacatcttcatatgatctttccagaactgagtggaaagatagcggcggatggtatccagcgcagattcgcctttttttggttttatcgcgtataaacagaggctttcggcgataaattcgagattttcctgcaagtgttcttcgccccaaacggtgcgaacaaactctttgacgcgagaggtaacgtcatcgtcaaaccactcgtcatccatcagcggcaggataccgtcattgtcagccgggaaggttttgtacgcgtcttcagcgaccagttcggcaaagcctttattgccttcatgggcatagaccagtccttcgcgatcgagggagtagcggcccatcatgcagccgatgatgtagcttaagatatctatagtgatatcagtgtaatacttattggttagatcggtatgatcttgaatatttttatatcgatagtttggattacatagtagagttatttcactttgcaatacagctttaattatagttttgtcaagttgtaatttatctataaaaatattatttatagtattttctattaggagaagtgtttcgactaacttgatatttgtattgattttttgtttgtagatattccgtagcaattgagttgaattgtgttcaagcaatggtgaacaaacataatcccatgattgctcttgagagtcccagtcatttttagctatttcaatagcattggtgactaattcgataatttcatcttcaatttctggatatggtactgaggctaattcaccactagtaaagctaagtgtgggggctagtattgataaataatggtttacaaccggagtgcacattaatcccgcagcgtaaagcaactcatttttgttatttgaaaagccgcaacggcctgtatcatcaaaaacaaacccttttggacgatatctcacgcaaaaattaccttggcttatttttgaccatgttatgccttctctaaagtaatactcatcatttcttacggcagagcgagttttgccattctcaaatttaaaatttcgtatttcgtaaccattattttcccaatttacaactatttcgttattaccataccactttcgatattcacctccactactacaaggaaaccatttgatattatgaatgtcgatttttgtatttgattctttatttgtgataagggttttttttattgaaacctcgtaccaatatctttgaaatttaatattgtcaccggtggacatgcctgcttttaatgctattttttctccaagttttttatggtggcgaaaagataatagactcggtaagtctatccaatatgctattggcattcctggtatgtttttaaaatcatgctgtgtaaatttatcaaatatatttttccttagaagtagatcgcttttctttacttcttccctaccatctataagtctaaaaaatacaggttggtaacgttcggagtgttggtttttaatcacccaggcagttgtctgtacaacctctccagaaatttgcccaaaagcccgagctcccaaatgtgccatcgtaataaatgttttattgtccaataaccagttacgtagtgcttcataacttgacaaaaacatccatgattgcatattgacttgagcattaaacccattttctttaagcaaagaaaatgcattctgcataaacattgcaaacaaatcagctttactatccgggaagttatttttggcaaactctttcagctcactattcattcccttgccacccatatacggcggattcgccactaccgcatcataccgctgcgccaggatccacgcctgctgaatatacggaataaacgctttcgccgctgccttctgctggaaatcgccttcctgctccatgcgatatagcgcttcgagaaacgccttcagttccgcctcttcttcctgtggcacctggatcagcgagcccagcgttttggcgttcacaaagcgcttcagcgtgcgcatcagcagctgatattctgcgctgtcggtatgggctaatgctgtattttcggcaaacatatcccccatgctaccagtctggttctgctggtggaagttcagctgctgccacagcttagcaatatccagatgcaggctctcctgcagggagacaatattcagacgcacgtcgcgggtgaatatccggcggtcatcctgacgggccatcattaataaggcaaagccggaaagctgggcagcacggtcgtcaatgtcgagaccaaaaatattattttccagaattagctgtggaatatcgcgggcgcgatagccgcgctcttcatagatatttttcagcacattatagacttcaatcagaatatgcccggagccgcaggccgggtcgagtactttgatgctttccggttcaatactggcaggtgtaatggcggccagctgcgcctgcacttctggcgtctgttcggctggctcaatgtagtagtccattttgcctttcagcggcgaatccgggtaggtctgcaaccactggcggccgacggagttctgtaccagatactgcacaatccagtttggggtaaacagctgggtggcggcaggaatatcttcgctcttcaccaccttaccgataaccgcatcttttttctcagagatatagaactgatacagccagccgataacctcaacttcttgccagtcttcttccggaataccgtccaccagaccgcgtagaatggagtcggtgcgggtcaggttatccggcagcagtagttcagcttcatcgtccacagcttcaaacaggaacggcatcgcgcggtgcagggcgtggcactgggccagcagcagttcacggtagatggcttcgtcctggttgccggaaagcttcatctcgaccagctgcgcctttttctctggtagtaatgcttccgcgacttccggtacgtggtccagcacttcaaagcctgtcgggttatccgggtgcgagagcatgtggaagccgtggtcaagataaccgtggatttccatataacgaatggcgcacaggcggttgaaccaggtgtaggcacagtgctcaaccagcacgtcaaagccctgctcgcgggcgcgttttaccagacgatcgcggcgggtgagggtggatttggggtagtcgaactgaccatagcgcatggtttcgccgacgagctcggcatccgcaatttgcagattgccttttttatcagcggaaatccccagcgtggttagcttttggatcaccgcatcgcggaactggttacgggcctgtggagcgtattttttgatgttattggtattcatagaaaatcctgcaaagggcagcagagcgctgccctgaaatgggggttactgaagacgaatccggtcacctgcctcaatagctgccagcagcgaagtacgaagcgtatccagcgctttttccacctgttcggcggtttccagcacttcgccaccggtggctttgcgcatctcgctggcgacattcaccagatgcgtttttttcggtaccggttggataacgggtttctctaccacaacataagtctgttgtgactcggccgcgcgtttagcttcattcgctgctcgtaactgggcttcctgctttttacgcagctcgtcgatccactggttaatcttcttctcggcatccgtttgcagtgccattgtttcttgctgttccgccagaatttccggaattgactggctgacctcggcacgttttctggctttttgcatcggcagcagaacgctgttttgcagctctgacgtggcatgcgcttcctgcaagcgttgacggctttcctcaatgcgggcgtcaatgcgttcaagggcgtgctggcggtgctgttccactaactgatgattgacgttctggacctgttcaatcagtggtgtgatgcgattgagatgcttataaggttccggcatctgccagatgttttccagctcgcccagtgcttttaccgccacggcgtctttttccagcgcgctgcggttggatttaaagctgccgttcagcgccgcgcctagtttttgccaggtagcaaactgcttgcggtagaaatcgaccaaattttcacgatcttcactgaaatccagaagctcattgacctggctggtgaccttctcaatcagggcaaaatcttctttttcactcagaatggaattcagcaggcgcaggcctgactcaatctcatctttacctggattgtttccaccttccgctttcgctttgaagacattcagctcttgcttccagtcattgaagacctggcggatatgttcaaccagggccggttcttcacgttcgctaaacggctgttgggcaatttccgccatagtttgtgcggccttacgaatttgcgattcgtcgtgacggcgaattttgtgcagacgcagctcgctgtggcgacggctgttattaaacagctcccacacctgcttacgctcgatattgttattctgctggctgaagctgaatttgcctttgcgcgccagacgggcaaccagcagcttcacttcttcttccggccatccataaggacggcgggcaaagtggttcagaatatcgcgtaaataaaccggcttattgaactcgatattcatgctgacccaggtttctacttcgcgcatcgcgtcggggttggattcctccagttcgcccagatccagctccgcatcattctccaccgtgagtagtgcatggatttcacgtgcgatatcaccgttgaacgggcgcagcattttcagcttggcaaacgtgttttcaatcacatagcggcaagcttcatccacgatgctggatggcgtcgaagatttcttcggtaagcgctcgccaatcgcccagacgtcagcttcggcaataagcgactccagctgaacgcggagcattttctcgcgaacgctgttctcacgggctttttctgaaagcagactggcttgttccggtcgctgacctgcgttgtccctgaggaatttttccgtttggacgaccaaatcaatatcggtccaggtccgggcatcggcaggtaaacgaattaaaatgcagccgtctccctcagaggtgtatgggcggcatgccgcgtcgttgtcatagaaatcataggtcggatcttttggcgtgaggatctttaccaccagatcgttaagcattgcgccgtctaacgggtgcccgttcaggaagcggctgatatcaaagtcctgcttatttgccggatagcgatacttccggtttttcagaatgtcatcaaagatgatcgaggccagtttcttgttgatcgcggagaagtcgacttcgacgttacggatctcgttctcgatctctttttcttcgttggtcagaaacacgtatttgtcttcaacacgtgcaatcaacatttctcgttccagcttattcaggcttttttcaacgcgacggcgtagttcgactttatcggtatcgattttgtctatcgaaagggtaaccaggttatctaatgtacttttcagcacatcgacgtagcggatcaggaacagtgttttcagtaagttgccatcgaactcatcaagaatgccattctggcaggcctgagtgatggtgcggctgacggccggctccaggaagctttcaatcgcggcataaaaacgccagaagggaaccagagaatccagaccctgcggggagatctgctgtgccgcagtctggaaggcttctaactgtgagcgttcacccatggctaactgtttaccggcggcacctttggtccggatagactcaaaaaccttctgcagaatctggtagtgccacgggacaaacgggtagttatcaataaattcttcttcgctggtgtaggggcgcaaagaagcggtggttgtgggatcaaaagcaagctggttacgtagaatgtcgcctttttcctgccagactttcgccagcgcgggttttgcggcatcggttttcaccagcaaacgtttttggataacttcggaggtgttggagcttgaaagctgcaaacgggtagagaaacggccttgaattttagagaaatcttgtccgtcacggctgctcatcccaccaatggccgcattaatatccgcctgggaagtaacaataacccatgcgcgtccaccacagataacacccagattttcagtgatagtctgcagcttcaacatcatctgcgtatttttaccgatgaactggccgacttcatccaccatgaagaggatatttttgccgttttcatccagccactctttgacccactggcaaaaattattgatatctaatgggaaattcttatccagctgttccacccattgacgcgaagcgtcaacgctttgaccggtggcctggcttagggcttctgccatttcatcgctgatgaaatagtaggaatcgcgctctttttcccagcttgagtcagtgatagtggcgaatgcggtcttaaacgcgtcgtattggccgcgtttagccagctcacgctccagatgggcgatgtgcggaaaatcagcacagtagccaacccgttcgttaaataccttcaggaagactttaaggatggcgtcttctttgtcatcgacgttagcacgagaatcaatattgaacagaatcacttccgtcggatgatggaccgctttgttgatatcagcgaggaacagagcatctttgattttgtcttcaaagaaggagtaagcatgacgttctgtaccgttatggctgactttgcggttagacaacagatacgacagaatcttgataaagtgtgatttacctgagccaaagaaccctgacacccatacgccaattttgttttccatgcgtatgcgatccggaccggttgccggaacataagattcaaagaagtggcgaagatgcccttccagttcccgggtgatgacgtattcatcaagctcaatccaggcactggcatcgtccgtctgttcggctttcacaacgccattaatatttcggtccagacgtttctcaaagatctgttcaatattcattgctgtgctctttaacgaggattcaatgtcgccgcaggcccgctttcgggtaccagcctgaaggcgcgataataatttcgggaatcaatgcccgccaatggggagagatcgtgtccgctataggttcccggataaaacatcagcaggggggtaaaacccatcacgtcctgcaaggcgctcatcagctcatggccacgaaccagcggccaggcgttacccattcctgtcagaatgacaaactcttgattctgaagatcgactttttttgctatgtaatccgcgatctttttctgattcaataagccaacgagttgttttttcagcgcttcggtaccgactttcacttcctgctgacagacgcggtcaaataacccacgttcagtgagcatgtcgacgatgatctgaaagatgttgaggtgcgcgaacttgtggtccttttccagattacgcaacagatacttcaggtgttcacgcacctgcagctcattctgagcaggataatcaaaaatccagaacccaatctcattaccggagccgttgtttttgagaaagcgctcttcgctaatgcggctctgaacctgtgacaggcggtattcaagcacgggatcgatcaccgttgtccctccagaatagaaactaattcttgttgtccaaggcgctgcaaggtcgcctgagtttctggtaaaagaaagaccgactggagattacgccgacgaggtgtatccagataaccagcttcagccagtgctttgatcaagttgttacccatttttttgatggatgaatctgagtaactggtgagtacgggctgctgacgaagatggttagccacaaactcatcccagctatccatagggagcttttctttaaattgtctgcacaggtcgttcaccacttcagccaggaagtctttaacaaccggtgaatggaggatcagagcgacgaacagcaattgctgacgctcgcgctcgctcccttcagcaataagcgaccacgccactttatcaagcgtattcaggcgtagttttatcgttgtagcatagcgcttcgccgtattggcagaggaagcctggagaatgttatgacccacgatctgctcttgccaggtttgttcattgggagcggtaagcatgagctcagcgatgattcgactttccctgctcatcagcggcccgcctagcaggtctccaatccatgccttgtcgtttttcatcgtcatatctaccctctgaagactgctatgcagctcgcaaaaaaacaaacgatgattgtaatgggggaaggggcgggatgccatgagaaaaggcaatttgtgagatgaaagccattacggagaccggtatttatccatccctttgaaaaaatgatttttacagtttgttcattgagttactgatttgacagattattcggaacggtaagtcatataaatcttttgtacttcggggtcatccaggctttcataagagatgttctttttatctaaaccatccagccccttgatcccgccaataatagccagccaggcactccggtctgtgatgctcacaacgaatggttccaggtaacgatcaaggtgctttttggatggttctccgatttcgtcgctgagtgccttcaaatagtaggtaatcggccacggttctcgcactatggtctgtagcgcgctggtggagtcacacctgtagtcaagtgacgcgtagagcgccagatgaaccattacgagcgcaagcagaatttataagggcggtgccttaaagagcacagggagattgtaagtagcccgatattgctggcttttgcttagcttgctgacgggattcgtcgtatgaaacatgaaaattacctcatgttttatataaggattcgacactatatcaaaaccggtaactctcaatctttcaaagctatgtgtcagatcaggtcgtgataagacacataaatttaaagatctatatatctggccagatagacttttttataacagctttataaattaaacaaatctgccatagagacagatttgtttaatttataattagaggtttgcaacgttatgatatactttttgcacatcatcatcatcttcaagggcatcaacaagtccttcaaagatttctaaatcttctggtgaaagttcaacttctgattgagcaatcatttctaattctgttgttgaaaattcagaaattccagctgcttttagcgctgcgattcctttatgcaggtctgtagcttcagtataaataacgatgtttccttcttcttcggttacatcacgaacatcaacttcagcatcaagcaaaatttcaaaaatatggtcagggtctgttcctttaaatacaatcactccagtattgtcaaacatatagctgacagcacctgccgctccgatattcccgccttttttattaaaaattgtgcggatattagcaatcgtacggttaacattagacgtcaacgtttcagcgataaccattgaaccattgggtccaaagccttcataacgcccttgcacgaacgtttcatctccgccacctttggctttatcaatagctttatcaataacatgttttggaacctgtgcttgtttcgcacgttcaataacgaattttaaagctgagtttgattccgggtctggttcaccttgtttagcagcagcatagatttctacaccaaattttgcatatactttagacgttgcaccgtctttagctgttttcttagcaacaatatttgcccatttacgtcccactggaaacatctcctcaaaaaattatttacattaatggcaggttaataacctgcatgtttttctgccgtattatatcataatatataaattctcgtctatgagaaataaaaacatccagcttttacggggggttactttgattttaacaatggctaatatggtgggtaagccattttttaattttcttctggttctttttttatttttaataattgaattgcagcaataacgtcttattgatggtggtgtcgctcatcaggtgaggtggaacgcttgcacgtcttgcgacatattgtggcagaaacttaatggcgaaattaagagcctatcccattagggctattttacttgccattttggacctgggcagtgctcaaaatcctcacgtactacgtgtacgctccggtttttgtgcgctgtccgtgtccaaactggctgcgccaataacgcctggtgggatagtctctaaggcgatatattcccgccttgagccgtgttaatttgttggatacttttaaatggaggtatacctcttgtaggctatacctcctgcttcacgttatcgcgcgattaacgcaaatacgccccagccaaagtattctcgcgtccaggtgacgtgacgtttgggggctaccgtcagttctgttcgaacctcttgcgcaaactcatcgtcagggttttcctccagccagcggcgcatggtcatccacttcgcggcttcatatctgtcccagccttgcgggtccgccagcaccatttccactacgtcatagccgagttggtcaaaaaaggcgaccagctcgggcaggggacggaaatcggcgacggatgagacgccacaggcgtgggcgatctcttccgttgcggggatccgacgccagtacggttcaccgatgagaatgatcccgccaggtttgaggcttttggccagcagatctattgtccccgcgacaccgcccgcaatccaggtagcgcctacgcaggccgccacgtcatatttttcctcatcaatataaccggccgcgtcgttatgaataaaatgtacatattcactgacgccgagctcttctgcacgttgttttgcctgtgtggtgaagagcgggcttatgtcaatgccagtacctgtaacaccgtaatcgcgagcccaggtgcagagcatctcacccgaaccgctaccgagatcgagaatccgcatgcctggtttcatgcgtaacgcatggcccagcgtggcgtacttttccgctgtaaacggattatggatacggtgttcgctttcgctaatggtaaaaatacgtgggatatccattgggttattccttttactgagggcaataccctcagaagtggatactttttcaaccagcagcgcaaacagcttgcctgcaaaagtctcgccgaccggccaggtgtgactgtccgggcgctgcaacacagtgaagccagcatcaccaagcaggctgatatattcatcatcgcgccaggccttcatttgactgccgaaacgggtggtacagccgttttccgctatcgcccagaactgcgttgagctggtttgggcctcttcatcccaggcattttccgttaacagcagatgaggctcggcaagaaacaggccgtgcggacaacgctgccagcctggctgcgccatgccctggcgtttaacttcatcgaaggtatgcacttcaacaagcagtttgccatcgggtttcaaccactgagcgcaatgactgatgaggctttgcgcatcagcagcgctaaagacattcagttccccaaacgtcatcataatgaaatcaaaaggttccgtggggtggtatgtacgaatatcctgctgaatgtagtcaatattcaggtttgcggcttgcgcctgctggcgagcccatgtgatggatgccggagagaaatctacgcctgtgcagtgaaacccacgctccgctaacaggcgggtataaaaaccggggccacagccgagatccagaatgcgggcgccagcgggtaactgacgggtaatccatgttacctgttgctcaatcacggttagccggcggctggcccagtcgtggtcctgcgacagatgattttccagcatgcgttggctgaaggctggctcgtcccaggggattttgccttcatcgggtaatagccgaatgcgatgcgttgcaaaaataacggcgctgatatccatcatcatctccttagcgattgtcaggctgggcgcgaacgttgttcagcccggttgtattaatgcggtagggctgaccgttaacggatttgatcagctttttggttttgagttttttgaatacagcgagcgtgcaatcggcgagcaacagcccttcgcggctatagcactcaacggcggtgacgcggcctgacgcatcgcggatgtgcgtaatgcgtccgcctttggcgagaacgtgtaaggtacgttgttcctgacgggataaattcatactgaagaacctgtttaatcatcataggctaaacgtgcaaacacactgcggtgtccgcattcgatttcggcgcattgataatcagtccggcctgaaaaggtcgggtaactgattatcagatgatgacattctccagcatcaaagcctcgggttgagttgaaaggtatttacgtcgtgaatgataacacctgatttctgtaagtgaataaccgggagtgaaaagtgtgatctcaaagggaggctcatgacgtttagcgtatcagatgaatagctcccgcaattaccataatgaatattgattaaactcatatacccgataatgaccgctttgatagtctcggcgtatctttttagccattgacagggttgttgcgttggaaatctttttttaaccaactgaaaaatatcacttaaatatttttcatacataaacatttatggtccgctgagttcggatccggttttgtatgggttaaaaaaggtacgttatgaaagtcatatggactgtcactcctgtggggtatcagcgcatagcgaaacgttgcccttcatgcagcgtaaaacgggacttcacgccttctggggcatttcgggttaattcgcaaaagaaggtactcgatgtctggagtatctataaatgcacacactgcgattacacctggaatatctccctgttctcacgcctaccagtcagcaaaattaaccgcgatctttattgccggctgatggcgaatgatgctgccacggtgcaatattttgcttatgacaacgcgatcctgaagcgaaacaatgctgaattatcggggcagcctgattttcacattcaggaacggtggctggtcagtatcgcctcccacaagcaggtcagtgttagcgtcaggatttcccgttcttttcaggtcagcctgctgtcgattttgaagaagcaactcctgctaagcgcagccgaaatcaagagacggattgaaacagggcaaataagtggcgtcacgatgaaaatgcttaaatcgcgaaaactgaagaatgcgaaatatgatttgcagctctcagttgaaacactgtatgaccggcgaaggattgttctgacctgtcgataaaaataataagctcaccttacgtttaagtgtgctggtatggcaacgacgcaacggaatgaaagaaggattaagggacaggtgagctttagttgaataacgcttgtctgtggcattcagtgaaggctgaatgccatggataatccagattttcgcaccagtgatgatattgtatggattctttgcgcaagccagcagaatgacaaagggcgatgggttacaattatctgtagagtaaacaaaaggaatataatgtggcgctatacaatatctctgagaaaatactgactacccttgaaaaaacatctttcaccatcgaaaggctgcaggaacgctatgatcttcaggaggctatcaagaagaatattgatattgtcgcgccgggctgccttgtcatatccgaagaattctctgattgggaggatagtcggcggaggattgatttattagcgattgacaagcaggccaatttggttgtcattgaactgaaacgtgatgaaatcggcgcgcatatggaactgcaggcgctaaggtatgcggcaatgatttcaacgatgagttttgcgaaagcatgcgaatattatcaggcatatctttggaagcatgggatcgatgagaatgcaaaagagaagttactggattttgtggagttagaagaaaacgaactcgctgattttggtaaagatattcgcatcgttctggcatcagcggatttcagtaaagaattaacgacaaccgcaatatggctaagagataaaggtgtcgatattcgctgtgttcgcttaacgccttacaactttaagggtgaagtgctgattaatgctgaacaaataataccagtccctgaactggaagaatatcaggtcagattcagagagaaacgcacggaacaaattattagcagtcaaaagtcggagagggattattccttatataaatataaaggaaaaaccttcaataaacggaagcttgcacttgaacttttcactgactggattaataaacataatcctgcgaatatagatgatctcaagaataaattgagtgaagacttacagaaaagaacagtagcactggttgagcagatccctgaaaaaaggaaaaacagatatcatatgcaggaagatgcgttgattgagttgccgtccggtgagcgtattgctatatcgaatcaatgggggttagggactatagaactgcttattgattttgttcgtcaggataattttgtagttgaaaaagtaggttgacaggaagtaataataaaatagatcccattcattaatgggatctcacgtttcatccgatacgaagaccatggtctctttgtcagtagcgtcataattacgcaagcctctttactttgcttatcatttatatttaatgtaaatattcacgcaacaccattaaaaaataagaaaaaatggctcactgttgaactgatattaatacctgaaccactgaattagagtaatgtggcgctattcatagcgtaattttttctgttgcggttacagggggaggaatgcacacctttagaccatactcactaaggcatagcgatctgttatatgaagatattccgttagaaatacgcgagcaaataatcttattgattatcaatacgctaggaaactgctcctctttttatgatatgacattatactgctatcataatagtcattctgacgaagtttatcgaagaatatgtaaaacgttgcgcaaagagtatggcttattcaccttatatgcgcattcaacgtcatatctggatgaaatgagtaatctgttattaaaaacagatgataaaagaaagcatattgataccattgagcttgcttttaactatatagatacctaccttcggacctatgaagttacgcttgggttagaaccggataaggcgattagtgaattaaataatatatttcatgagcatagtttaaaatatcgatatgaaaatggtaggattgtaaggttgcgcagaataaaacggcttaaaaacatatgttattatttgtactcccctggagagtatggctttgtcgaatatgatcttatggaagcgtataatcgcctgatgcttaatgattttgcctgtgtcgtaaaggaatgtcatgcagtcttcagaagcgttcttctcagaattcatgagagaaaaggtatcgtatatcatgaacaagatagtttaaataccttaatgactaatctgatggcgagaggcgttatatctgctgaatatgcacataaatttcattttttaagtaacgtgctggagtcagaaatatttctgccgatggcgccagaaaaatcgcatcatcactacgcaatgatgctccgtatctctgaagagttggcctgtagtatctattatcttactgagcggagtatattttttcttacccagcgggctgaagaagacagtgtcgcgccataataatgatcgcgctgtcgctcagtcagactggatcatcgttatttaaatttgttcagacgtcggaattttttgttctgccgtctgtttttttagtgatgagctgttcagtgcaataataaggggtacagtacgatgactgatttttaaactgcatatcatctgtgtcgcatttactcatgggtattgggtcagggagagagaagaatgagcactattttaaagccttttttattggcggtaaccctgatgttaatcttaataaggcctggctttgcaacggaggatggagcgataaccatggttaaaacctacagcgcttatgactatttgcagacccgagcgcggttgatgcacgctgtcgccgatcacggtctggtgttatttggggaatttgaccatgccagagcggcacagaatgttaacctgaaaatgccgccgacaacggttctggtctttggcaatcctaaaggcggaacgcctctcatgctggcgcatcccgaactggcgctggatttaccgtttcgggtgctcattagccagcaagccgatgggcgaacgttagtcagttatcatcccgctgaaacgctgcaacgttatggtcttgatgccgcagacatacaggctttgaaaaaactggaacagctcgttgaaaaaagtctccactaaagctgaaaatcgggcgatgtgtttgcacaagtgatgtcgcgaataaatgcggtcacatcgtccattacctgatgcgataaggcggcatcgaaggtggcgctatcagcatcacagaacccgtgccgcgcatcgtacattttacactgcacccgggggcgcttttccagcgcctgccgcatggcgaggggatcaaacgctggctcataacgcgcgacaataaccagtgtcggacagagaggcgcaagatgaaggtactggcgtatacgggaaccgtaatagcaaacgacgccatcgcataacccactggctgcacttagccatgcgagcgttgcgccgacgctatatcctacgacgattagcgtctcgtactgcgttctgagatcgtggagtaatgtggtaacgacggcgggatcaaagccgacatttgctgaaaagtgacggtaagcctcctcctgctgttcatagcgaaagggggtatggtgaggaaacagcgcgggaatatagatgtcgaatccgcgcgtcatccattcatggcctgcgcgttggatatgagcgttaataccataaatttcatgcagaataatcgctgcccggcgatggcggctcgacaaactggaggcgttgcttcccccggatacgcctggggcgaaaaacacggtgtcttttatcataacgcgttcttgatacaaagagagcggctggattttcgccgatcacgctatgtcagaggcattattcctgtcaatgtacagacacattttatggcctgatttttggttgataaattttatattggtaaaccaatatgctgttcatattcaggcatcagggctaaaggtggaacatcagtcgtgtattgtctattgcctttcctttcatctggcctcactagcgaaacggcgcgcattattattttgttggttgaccagtttcgcgtttttggtgtgctacgcgtgctatccctctttacaaatgctatagtctgataccgggaaatcgcatcggacgggcacgaccaatatgaaatcaaacacttctcagcaaagaccttaccaggaagtgggcgcaatgatacgggatctgattgttcagacgccgtaccgccccggggagcgcttgccgccggaaagagagatcgctgagaggctcaatgtgacgcgtaccgtcgtgcgtgaagcgctgatcatgctggaaattaaaggtctggttgaagtccgccgcggcgccgggatctacgtgctcgacagcgcggataataacgagatggaaggcgctgacgtcaatcactgtaatgacgccgggccttttgaactgttgcaggcgcgtcagttgctggaaagcaatatcgctgaatttgccgctctgcaggccacccgcgaagacatcattaaaatgcgccaggcgttacaactggaagagcgagagctcgcctccagcgcgccgggcggctcagaaagcggcgatatgcagtttcatctggccattgccgaagcgacccataacagtatgttggtagagctcttccgtcagtcctggcaatggcgtgaaaataatccgatgtggctccagcttcatagccatctgggcgatacgctttaccgtaaggagtggctggtcgatcataagcagatcctcgcggcgttaattaagaaagacgcccgcgcagcgaagctggcgatgtggcagcacctggaaaacgtgaagcagcgtctgctggagttttccaatgttgatgacatctactttgatggctatctgtttgagtcatggccgctggacaacgttgatgcctgattatacctggaatagcgtgggcagacccagtccacgttttacttcctgtagcgtcttttgagtgacctcatgggcccgctcgctaccttttttcagtaattccattagcattcccttatctgcaataaaggttgcccgtcgttcgcgtatgggcgcgatcagttcttgcaggcaggtctccagctcatttttacagacacggtcgcctaatccgccttgttgataatgtgctttcatcgccgcgactttggctttatccggatgaaacgcatccagccacgtaaagacgacgttaccttctatttttcccggatcgctaatttttaaatgattgggatcggtgtacatcgcgctgaccgcacggtggatggtctcttcgctggcggaaagaagcagggtattgccgagcgatttcgacatcttggcgctgccgtcaatgccgggcagacgacccgtatcgctcaggagcgcctgacagggtcgcaataccggcgaggagaaaagactattcatcttatgaacgatctcattcgtttgctcaatcatgggcaattggtcgtcgccaaccggtaccatttcggccttaaaggcggtgatatctgccgcctggctaatgggatacgccatgaacccgaccggcagggaacgggtaaagcctttttgggcaatctcattttttaccgtaggattacgctccactcgggcgacggtaacaatattcatatacagcaccgttaattcggcgagggcgggtaacgcggattgcaggcagatcgtcgtcagcgtgggatcgatgccgacggccagatagtcagctaacacttgcggaatattatcgcggattttttgcggattactgccgttatcggtgagtccctgcaggtcggcaatcaggacatactgttggtgatcctgctgtagcgcgacgcgctggcgcagtgaaccgacataatggccgaggtgcagcgagccggtggggcgatcgccagtcagaatgataggaagggtgttcattaaggactcctttatgcttactgtaaagccgaaagacgtcccgaaacgcagtagccgcctttcggcggctacttaaagagggatagtgatccgtgccgccttcaggaaggcagccaccagcggagatgacgttgcgtagcgttggatcgtttcgtgttcatgtgatctaacgtatcacgactaaacgtaagggtaaagcggctggcgtatcgtccgggcataaagtcatatcgcctgaacagataacatctcactgactttgaaacgcgattttataatttgctgcccaaaaatacgtggcgctgaaaggcgcatttttgatgcaaatcatttattactgtgataacactgcgcgcgataaaaacattaaatatattcacatagtaaatatgttctattggaatggttgttttcgatatgacaaaagtctaaaaaacccattgatgtgaaaaggaataagaattgtctatattccgattcggtggaattaagtaatttctcggataaaaataagaaatgatattgatatttcttttttgatatggttcttatagcggctatggttattcaggaaacgatgcttgaatgcctggcgtaatagatttcaggtcagtagcgctattgtaaaatggattgttgatggcagaaggtatttagcaagaatccagttatagcagattgtcggtatttaatctggtatacagagacaccaacgaaatggctggaaaatggaacgttctttcattgttggcgttccgtccttgtcagcctgctttgccgcatgataatcacggaggggggatggacgccatctatttaaaactggacggtattgaaggcgaaagccggatcaaaggttttgaaaaccaaataaaacttattgcttacaaccacaacccgacaaaacgggagtccggcgaagcgagagggacatatattggagggttgacgctgacaaagccagtcgatcttgctacaccaggcctctatgagcactattgtaacgggaaaacggtgaaagaaggcgtgctgacattatgccgtcgtgataagggcgcaatgctgccatttattatttatacgctcaccaatgtgcgaatttcacgcatgagcaatcatggagacgccgaaggcagcgccacggagaccgtggatttggtttatagccatattcgctgggatattcccgcattagcgtcgaaaagcaaaacacggcggcctcttcaccgacaggcgctgtggcgatgaggacaaaacaagcttgcggactcgcagtgggcgatgctgtatagcgaaatggcatttagcggcttgcgaaggctgatgagcgctcatgtaaccaatcgattgcctgaaaaggcgataacgcgtggcccttacacccgttatgatttttacgcatagccgctaataaaacggcattttttatatacacatcaagttgatagtgtgtttctgaccttgacgtaaataagcgggaaaagcgatgaaacacaccattgggatactgggggggatgggacctgcggcaacggcggatatgttggaaaaatttgttgaattgcgacatgccagttgtgatcaacaacacatcccgctcattgtcagctctatccctgatattcccgatcgtacagcatgtctgttatccggcgggccttcgccataccgttatctggagcgttatctgcatatgctggaagacgccggggcggagtgtatcgttatcccatgcaacactgcgcattattggtttgatgatttacagaacgtcgcgaaagcgcgaatgatcagcatcctggacgctaccctgggggatattccgccatcggcgcggcacgttgggctgctggcgaccaatgcgacgctggcgaccgggttatatcaaaagaaagcgctggcgcgggggctgacgttaattcagccagaagacgcggggcaggcgttggtaatgcaggctatttatacgcttaaacgtggcgataaaactgcggcgcaagcgctgctgctgccgcaaatcgatagccttattgcccgtggcgctcaggcaattatcatggggtgtaccgaaattccgcttattgtggccggacatgaacgcgcgatagcgtgcccgatgattgattccacagcgtcgctggtgcgcgcggcgattcgttggtatgagtcctggccagacacccgcgcctctttgaccggggagcaacgccttaccgcctgaggtgtttacagcgcggcctgaagcccacgcaggtcgcgccaaaatgtttcggctacctgactcatgcgggtattcatgcgataagcataagcctggatcgggataaccagttcgtcggcatcaagcactatcaggcgcccgtcggtaatctcctgacggatagcatactcgggcaaccaggcgattccgcagccgtccatcgcaacctgttttaacaattcactcatcgaagagacgaaaaatgtactgaaactcagttcagcatggcgagtcagggtacgatttatcaatcggcccatataggagttctgactgtaattaagcaggggaaagtgcggctgctcaagcgtatagcgcggctcgccccggccattgttggcgcaaaccggaaacagtctcgactcaaacaggcggatattatcaaacggcgcttgttgcaggttttcatcgtgataagaaaagataaaatcgctttgcccctcacgtaacatatccaccgcctggtcgacatctatcgcctcaacggcgtaggtaaactgcgtaggcatctgcttaacgatggtcggcaacaggccgagggagagcgagtgggcggcggcaatcttgattttacgcagcgtataatcgctgccgccgcgcagttcggtcagattactttccagctgctgtaacaggtggcgaacctgggagtgaaagattttaccctgttcggaaagctgtagcggcgagacctgtcggttaaacagttcaacgcccacggcatgttccagggcgcgaatccgccggctaaaagcgggttgcgatacgttgcggataatggcggcctgagagaaattgcggcacttttccagcgtcagaaaatcatatagccattttgtctcaatattgtgcaaacctgctccagttacatccatttaccgttatcctgtcagccgcccgaaggggcattctacgtccattcgggcggctgacaaccgcttatcccatcctctttcagaatgccgtgatggggcagcctgaaactagcgggaattacgccggttcaaaggtaccttttacgcaggctttcccctcattgaccatgcgtttgccgcgcgcatacacctgctcaatgcgtaaatctgcgctaaagacgagcagatccgcatcgttaccgggacggatttcgcctttgccgtccagactgaggaaggcggctacgctggtcgtcagcggacgcagagcattggccaggctgaatccgtagtggttaaccagcgtctgcaacgtctccagcaaactttcgaagcccgcgacgccgatacccgtcagatttccggcagcgtcaaatagcggctggctgccgttaccgtctgaactgagcgtcacccgggaaagcgggacgccggcttttaccgctctggcaatgccctccgccggcgcgacgggatccggaatactggtggtaatgtcgatcacgccgcctttaagcgcaaacgccagcgcctgctcgaaaagagattcgctacggttgacgtgggtaggcagcagtttaccgatcggcacgtcgctgttttccaggatgtcatacagcggctgtaacccttttttgctgctgcccatatgaaaaacgctgacaccaggtttgccccccagcaggccgccaacgcgtgattcggcggccatgctggcgagttgattcccgctgggcgcggcggaacggtggtcggagactgcgcatttcacgccaatgacgcggtcgatcagcgcgacgtctttttctaccgagccagtaatggtcggcgacggaacgtgataagcgcccgtgagcatccaggcggtgatcccctcctcatttagcgctcgcgttttggctaacagcgacgcgggatgacggctgacggagtcggtgccaagcaggccgacgaccgttgttatcccggcttccgtcaggcggctcagagagacttccggcgtccgcgtcgtcggccccgcttcgccgccgccgccgatcagatgaacgtgttggtcgataaagcccgggcacagcatacggccgctaagattaatcaccgtacagtccggtacgatatcgccggggatgccagcgccgacggcaataattttgccattcgcgagtagaacatcgcagatgccccggtcttctggcgcaaacaggtgcgcaccctgtaataaggtaaactccgcggcggataaatcaggcatgataactccttattaaacaataagctgcatgacccagatcgacagcagcgcattgatggcgcagactgcgataatatgcgggtaatatttggcgttgacttcggcagtaccgagacagcggccgacattctgtaccgggtttcccatcaggtaaatggctggcagtagtacggtaacatcgtggccgcttagcgcgccggcggtagccagactggccgccacgccaacggcgccgcccatactcatcagcgaagccagaagcaccgtagccgcttcgccgggaagcccccacaacgccatcacgggctggcagatatggcctacccagtcgagcagaccggtaattttcagcgcctgaataatgacaaatgccatgaccacattgggtaacaggttggtcgtggcgatggtaaaaccgcggcgtgcgccatcgataaacatatccatgacattcttacgtacctgagtcgtcatgattgggctccttgcgcagggtgacggcgttcttcgatgttaatccagatgcgcaaaaggtttgcgccgataaatttgaatagcagaatgaccaccagcggaatgatgactgacgttcccagaaaggcgaataccgcaacgccggaggagaaatagttggtgataatagcgctgccgctggtctgccaggcggcaaaaatcactttatcgcgttcagtgatttcgccttcctgcgccagttctttggtcatacccgccgcggcgtcggtattttgcaggttggcgatcagcgccagtgagcaaatgccaggaatgccaagcaacggtttcaggatgggcgtcatcagttgctgcgccgcccgcagaccgcccagtccatccgtaatcgcgatgatacccagagaaaggataaccgacggtgccagctccagcgcaaaaaggaagccatctttcgcgcccgttccgcccgcgccacgaaaggtctgcgtaccggtcacatgaccgaatgacccgttgagtacggtaaaatcaaaaacgcgccaccagccttcgcttccggaaaatacgccggaaaagaaaataatggtgagaaaaaacgccaggtatccctttatcccgaccttttctgtatcaagcggcatggccgccccgtccacttgttgcgccatagcgatccccgaatttttttgatgatgtgttggttgtagccacaggccaaaaagcccgaaacagaaagaccttatcagccataagggtaaggacaaaatgcaagtatgtatcgtgctatgcgtttcttgcatagcagcgcgaaaaatcaccatcctcgctactgccggaggcgcggggaaccgtggacggtataacgcgaggtaaaaaagcaaagaaacaggtgttgacgcaggccggagctgggagcaggaaaaaaggagaaataaatttgacgttagtcaatttcacgccacttaattatcgttgttaaaaaataggattttttaacctaaattttacttttttactgtaatttttcacgccttaagaggaattgtcacggtcaggtcagtagccgctgataggtcagcttgcgccctaagaatcctacgggcaggtaataaaaaacgaataatcgaattaatttcatgatgtgatttatttataattgtgatgatttgagagggagcgataatcatcataatggaatatatagccaaaataattcgagttgcttaaaggcggcaagggagtgagtccccaggagcatagataacgatgtgactggggtgagcaacggcccgtcagggcgaggcccatggatgggccgggtaatccgtagccaacacataagccacttgaagtaggaagggtatataaaataataggcagattaataacactaaaaaccatagaataagtatagtttttagtggcatctttaccttgaaataacgtgttgaggatgtgctattaaaaacagatcctcattgcgccgcgaatagcattaaagatacaacccggtgcggagagcgtgggtttactctaccgcttattcacgtatcacaaaccgtttttgttttatctgctgcacagcgctgatcagcgcggcaaaaaagagcgccgcggcgccgcaaagcgtggcgttgataattgccgacgcgccattgcctgacagactggcggcgagcggaccgagaatttgcccaataccatacgttagcgtcaccaggcctaacaaattaatattacccggcgcgctgagttgtcgggcaagcggcatcaccagcgaggttgtgcccataaacgtggcgccaaaaccaatactgctcagtattaacagcaacaacgagtcgctggcgagagacagcagcacgcaggcgctctggatcaacaggttcgcggtcaggcatggcaggacgccccaatgttttgccgcccacagccagccgaagcagccgggaatgatcgccaggccgaccaacgaccaaaggtgcgccgtgagtagcggagagcccgcgcttttcgccatcagcggcaaataggtagcgacaatgatgtagccgaatccggcgaaaccgtacaacagcgccagttgccaccagggcataggctgattttcgattcttgctaagggcgcaggcggcagcgcatgagcgcggggggaatcaatattgccacgattaatagcaatataccggcgagcgccccggtccccagccatagcgaatgggccgaaagcgcataatgtaaaccgccaatgacatattcgttgcccagtgcaatcccggccccgacgccggaaaagagcgcggcgatcacaaacggatggcgggtatgatgcaacacaatcattgatccaaaaatcatcattcccgcgctcgcgacgcctgccaggaagcgcaccaacatgacgaccgcgggttgggtaaatatcgccatggccagaataagaataccggtggcgaccgccgaagccagcagcatggggcgtagacgagaggggagatgaaaaaggccaaaggaaaacagtaagcttcccgccaggtaccctgcataattggcgctggcaatccaggagagttggttaaacgttagctgcttttccgccagcattaccggcagcatgggcgtatacagaaagcggccaactcccatccccagcgtcaataccatcataccgaaaagcgccgtaaaaatgggatggcgaggtgaagcgctctgagcatgaaccatggtttttctctttgctaaagtaaggcaagaatgcctgattgttgttgcaaatgataataaaaagtaaaattaatgtttcaaatttgcaagaaaagaaagtgaagcgcaggcgaataacggattgagaagaggggcatcggtgggaaatggcattaaattaatgcctcccacgtgcggggtttggcagttaatctgaacgagaattgcgccttccccttcttagatactgagcagtgccggtatttgcgacagtaaatataacaccagaccgatagcgccgccgaccagcgtgccgttcacgcggataaactgcaaatctttaccgatattaagctcaatctgctgcgacatatcgcgcgcatcccagccttttacggtatcgctgatgtggcgcgtcaggaaggcggcgaattccggcgcgacgcggtgcgcggcctgttccagatgaccgttaagcgaagcgcgtaatgcgtcgtcggcgatcagcgtctcgccaaaccattgtccggcatgagcgatgcgctgcttcacctttgagtcttcggcgttgatatctgtttttaaccactggcgtagatccgcccagatttcgccgagataacggttaaacgcctcatcttccttcaggtaacttttaatgttttctgcccgggcagccatttccggatcatgtttaagtttatcgatcagcttatacgtcgcgcgatcgaaggcatgacgaatctgatgcgcgcggtcgtgactgatatcatccagcagagaattcaccgcgtcggagaccagttcagcgctgtgttctcccagccattcggtcggcagaatcttcgcttttaacggatgttcggtctccagccagcgtatgatctgtctggcgataaatgttcgggagctgtcacgctgtaacagggcgataagctgggcgatcagcgtatcgagtaacacctggtgacgatcgtttttggtcatgctttccagcatcagggcgctggtgccggaaagatccactttatcaatcgccttatgtaccgctcgcttgagcagccgctgaatacgggcgtcatcggttagttccagaaagccgctcataatttgcagcagatgctgcccgacccggctggcgttgtccggctggctgaaccagtttccgataagcagcgcgggttcatggcggcggattagcgcgatcagcgactgcgtatcaaggaacttctcctgcacaaattgcccaagattttcgccgattcggtctttattacggggaataatcgccgtatgtcgtgaaataaacggaatgggaatgcggcgaaacagcgccaccacggcaaaccagtccgccagcgcgccaaccatcgccgcttcggcaatagcttttgcgcccagcacccaaaaactgggcggcaggaaaagcgtggtcacaaacgtcgcggcggctatcagcaacagtgagagcgccaggcgtttggcgcgtttgagttcggcgattttattcatagggttaaggatagagccagacggcaggaacgtgcaaaaaacatcagattatcctgtgccggataagcctctatccggcagagtgtttacttctcagcggccagttctgccgcctcatgctggcgcacgcgctgtaatagtgtcgccagagtgaagaccacaatcaccccggccaccgctgccagcaggtgaaacggcagtctcccgccgtgaaaccacagccagcggccaacttcgaccgacaccgccatcaccgtcagaatcaccatgttcagcgaggccgaaaccgtcccttttggcaagttgttggaaaaaagcgtgaagcgaaacagcgtcgggaaaatcatgccaatgccgaacgcgtacaggctggtgcccagcacagaccaaagccagacgtgcggcagaagaagattaccgaggagtaatgtcgccagcccgcttaactggattggtacggcgcgccagataaaacgcggtcgggtcggatctttcaccaggcgcacaacgatcatattggccacgatcaccgcgccgaatacgggcacctgcgcccaggcgaattgcgaagtactcatcccgccagcatcgatcaggatcaccggcgacaccgccacccagctcatcatcgggatgtagctcaacgacagcgtcgccgccccggtgagaaaaatcgggttgcgaaacacattacgaaaatcgcgcagtacgctcaccgcgctgaacggcaccgcgccgcgttgcaccgtttccggcatcgccagcagcaggccgcacaacgccaacagtcccatcaccgcaataataccgaacagcaccttccagtgaacgaagtgcatcagcgcggcgccggagagcgggccgataaccggagcgaccagcacaatggaggtaataatcgccatcagcttaatggctttggtttgaccgaaggcctcctgtaccgtgacgtagccgaccgttgcgataaagcaaatgctggtgccctgcacaaaacgggcaaccagaaactgcgtcattgaggtcgtcaacagcgttgccgcgcaggcgagagtaaaaattaatgcccctgcaatcagcactggccggcggccaatcctgtcggatagcggccccagaagccattgcaacgccattccgcccgccagatagagactgaccgaggccggcgcaagactgacgtcagcattaaaatcgcgcacgacgttaatgatgccaggctgaatcagatccgtcgtcagataggcggcaaaatcgtacaaaatcagcgccatcgggaaaaataacgttgtggcgcgttgggagaaaaactgaataatccgttgcataaaaaatgcgctccatgtcggagaaccccatgatgggatagcgaaactcaataccgtcatcgtgacgtcaggcaggcgatagaaacagcggctgcggatgtactgaatttcatgtaatcaaaaacgctgccggtgaaaacacagacaggaagagacgcgttctgaatctcgtcagaacgtgtggcgattacagataacaatcagcacatcacacctcgggaaatttacgttgcacggaaaatatacacattaagtgtaattaaattttgatgttaatcaaaagagtttgtctggttaataaagataaaggcagggtgcgcaggctggtattttgcgtgctcagttccgaaaatgcatgtgcattacagataacaggatttatcttccgtcgcgcctcgcaatgctgaaaaggtacggatgagaaaggaattttcaggaggtagagtcgcagcatcctggtttggggggacggagcgccatgaaaaaatcgacgacctcaacaccgcatgatgcggtgtttaaaacctttttgcgccacccggaaaccgcccgcgattttatggagattcatctgccggtgtcgttacgccagctttgcgacctgctgggactggttgaacgaattgcttcgctgttagttactggttgcgctaatgacaggcagcttaaagcgctgtttaattatcttatgattcagcacggacatacgcctcgtttcaccacgtttattcgtgatgtggtagggcatgtcccgcacactaaggagagactgatgacgctgatagagaggatccgcgcagcggatcgcagaaaaggggaacggcaaggaagacaggttggtctggaggaagggctggaaaaagggctggaaaaaggtcagcgcgttgccgcattgcgtatcgccaaacagatgctggcggacggacttgaccgcgagactgtccagcggttcaccggccttacggctgaagagcttcaggatgttagccactaacgcggttccagtctgaatgttgcaggcccggtgcccgccgggcaacgctctctataattatcgctgataacctcacgaatataccgaactttaccgatagcgccagccatctctactacccttattgttctgagcggcatttacggctgccttaatgacgataacaaggagacatgtgatatggcttaccagacagtgaatcctgccaataatcagctcattaaagagtaccccccgcacacggacgcggatattgaagccgcgctgcaaaaagctgacgcgctctatcactccgattggtccaaaggagagattgaccaacgtctgccggtactgcataagctggctgacttgatcgacagccgtgttgaagaactggcaaaaatcgccagccaggagatgggcaagctcatcgagcagagccgtggcgaagtcaaactgtgtgcgcagatcgctcgctattatgcggataaagcgaagcagtttcttgccccggtgccttataaaaccgagtttggcgacgcgtgggtagaacatcatccgattggcgtcatcatggctgttgagccgtggaacttcccgtactatcagttgatgcgtgtgctggcgccgaacctggccgcaggtaacccggtgctggcgaaacatgccagcatcgtaccgcactgcgccgagacgtttgcccatctggtgcgtgaagccggcgcgccggaaggcgcatggaccaacctgtttatttcctccgatcaggtggcgaacatcatcgccgacccgcgcgtgcagggcgcggcgctcaccggatctgaaaaagcggggagcgccgtggcggcacaggcggcgaagcacattaaaaaatcgacgctggaactgggcgggaacgatgtgttcgtcgtgctggacgatgccgatcttgagaaagcggtgaaaattggcgtgcaggcacggctcactaatgcggggcaggtatgtacggcggcgaagcgctttatcctgcatgagaaaatcgccgatcaattcctcagccagttcaccgaggcgttcaggaaggtgaaggtgggggatcagatggacgcttctaccgaactggggccgctgtcgtcgaaagatgcgctggaaacattgaccagacaggtcgaggaagcggtgaaaaatggcgcgacgctgcacgttggtggcaagccgctggaaagcaaaggcaacttctttgagccgaccattctgacccatattacgcgtgacaacccggcgtactttgaagagttcttcggcccggtggcgcagatgtatgtggtgaaagacgatgacgaggcggtaaaactcgccaacgattcccactacggcctgggcggtgcggtgtttagtcagaatatcgaacgcgctaaacgcatggcctcccggattgaaaccgggatggtttatatcaactggctgaccgacaccgcagcggagctgccgttcggcggcgttaagcgttcgggcttcggacgcgagctatcggatctggggattaaggagtttgtgaaccagaagctggtagtggtgcgccgctaatccctgttgcccctctgaaatcgggaggggcctggctttttgcagcgaaggacgcggatcttaaatcagaacgaaataagcgaacaaaaccccctcaattgccctccttatttatccacgttgcactaaccgtgctttttatcccggtattgtttgtacagacattcatgatgcccgcattttctgttctatgcggaggccggtatggaattttacgagaaccgccccagacaaccattcattggctttgtgcagctcagacgggcgctaaaaaggtggtggctgcgtaagcgggcctgtcaggcgctgcgacgaatgagtgacgagcagttaagggatatcgggttggaaaggaaggatgtggaatagtgaatctattcaagggcaatagtaattaaaggattttatgatatattactatgcccttatgttatgcgtgctcactattttatatcatttatattaatatcattaatctttttctcaatgtatttttctggttttattttggttttttgctcaatcgcatgatatttttccttatcaatggttatagtcattttttcttttttgttaaatatgccagggatgataatcgctgctgcaattatcaataatattattattgctgcatgaattttgtgtttgggaaatgcttttaatagagtacacaggattgttatacccttatgtataagataaggaaaagatagaaataaaacaaatgggcaagcaaaatttatgacatgtttcccatagtaattattatttattgttagcgaaccaatacagaatgccatcacacaaaatagaaatattccgaagcataagaaggatataatgaaagaaccttgcataattcttttatgcaactcttgcaaaatactatttgtgatcttttccagtttagtgttatgacaaataactaccaacatcgcaaaaaaaatctcagataaagcaagcgaaaataacgtattgaaggccatgtagctcatcagcgtttcgaaaaatatactttgctgaagatagtatggtaatagagcgttgacctccataaaaaaagtacatagaaatccaagggcgacataagcaattaaaccttcatttctccaaagcgtaatgttttcttttacttttagccgcatgattttccttcactcattgatatgaattataattaaagctggcaagggttctttgccagcttattttatgcgtttacttagaacctgccatcacgtcgataaacgcctgcacctgcttttgcttacgcgccgatagcttgctcacctggcgcagcgactgcatcaactcgctttcttctggttgcggctgctgtgccgtcagcacaatacagccgttcatcaccctcacatccacctcggtaccggtggcgaaaccggcggcttccagccactggcccttcatggtgagggcgggaatgcgggtataatccggataacgactcgcataactcacggtaaggtgacggttatttgttggggagacttctggatcgcacggatctgcaatagaatggacggtagtcatgatggctattccctaaaatagtgattgtgatgagcgatatggccgtgttcccgcacggccatatcgcgctaaatacctgtacataacatcagtaaataaaagaaaagtccagctgaaaatagactgtaatgggaatgttcaggaataaactggatatatttttgatggttatgattgcggggaaataataaaaagcgcaccgggaaggtgcgcttgaaaataaaggtcaggcttttttacgcgaggtttttttaccgccgctggcggcgcgttcggccttaattttttccagcagggcggcggcgctgttttcaccgctgataagttcagggttttccgcacgccactgggcggtcagctcgccgcggaaggccttcgccaggatcgactgggtgaggctgttgacgcgggtcagggcgttgttgacctgcttttcaatggtgtcggcgtaggcgaagagttgttcgacgcggcggacgatttcgtgttgttcttggagtggtggtagtatcaatgggagtgattttatccttgccaaagccaacttcccttgagctcctgattttatttctgaattgataatatcctgaagataactacttctcagccataaagaaagaaatctattgaaaatattttcgtttaaattacatatcttggcagcattttcagttaaatttgcattattataaacatctggaattataccagcatcaccaatacatgcaccaacaatagttatataaagatctccagatgagactgtatatctagaaatacttttttgtatatattcttctaagtatagttgtccttcaggaagaacagttccattttttagctgccctgctctaatatatggaaaccctgtattctcagctattaatgattcacctttaggtaatctcttgccacctttgacatcagcaaattgaccaatctcactgattttccataaagatggaatagaaatattcaattctgttaacttgaatttattttttttatgaagttcttttgtcagttgcccgtttactgctgcaactatcactgattggcgaaaacgtttcaggatttgtgggatttgctcaagacgtgctttggtgctgtctacctgcgccagcagcgtatcgagtttttcggcgatgactttttgttcggcaagaggtgggacaggaacaccatagttctcaagaaattctttagtaacacgtttatgtccgactgaaccggacatattaagtgctccattagttaaaaaatctttagttttaactaaagcaaacaaccaatggggattaattaacccattaatagaccgaagaacataatattcagtgctaccggcaccatagccgttagggaattctttgattacaacagcttttccattttcgaagcatggcgtgattttggcaaaaataacatcatcgttctgaaattgagtaaatcctttttttacttcactccactttttggtttcaaagttacatttacctaaataggttgttggaacaccggccatcggcataaatccaacatctaaatcatcatcaagtttaagtttgggattgaggttgcacatttcattgattgtgcttgtagcccacccctccggcaatttccccccactcatgccttcacctcgccaaacgcttcattcagcaactgacgctgagcatccgcttcatcgcccgcgcccagctcgcgcatcagcgcatccagttcgcccagcgcctgtaccagctcgcccatcgcttctgccgccagcacgtccggctccggcagactgtcggcgtcgatgctgtctttatccttcagccaggagatatccagcgaatcggattttgcgctgcggatccactcgcggctgaacttgcgccagcggctggtggcctggcgctggtcagtgttcttgttctcttcgctgtcggcgacttcgctctcttcggcgttaaagctccactccccttcttcacgcggacttaagccgtgtggatcttcgccgtagacagtttcaaacggctgcagatgctgctcggtaaacggcgtgcgcttgccgaagctcggcatattggtccgcaggtcatacacccacacgtcatcggtgcagtttttatcctgatgcggattggtgaccgtgcctttggtaaagaacagcacgttggttttgacgccctgggcgtaaaagataccggtcggcagacgcaggatggtgtgcagatggcatttgtccatcaggtcgcgacgaatatcggtgcccttaccgccttcaaacagcacgttatccggcaccaccaccgccgcgcggccgccggggtgcagggtttcaataatatgctgcataaagcacagctgtttgttgctggtcgggtgcacgaaggtacgggtaatgttggtgcccgcggcgctgccaaacggcgggttggtggcgacgatatgtgccttcggcaggttttcaccgtcgctgcccagcgtgttgcccagacggatagcgccgccgtggtcgaggttgccttcaatatcgtgcagcagacagttcatcagcgccagacggcgggtgccgggcaccagttcgaggccgataaacgcgcggtggatctggaaatcctgagtgtcgccatcaaggtcatccagatcgttagtctgtgatttcacgtaacggtcagcttcaatcaaaaagcccgccgtacccgccgccgggtcctgcaccacttcacgcggctgcggtttcagcagatggataatggttttgatcagcgggcgtggggtgaagtactggcccgcgccagatttggtttcgttggcgttcttctgcagcagcccttcgtacatatcgccgaagtcgtcgcgggatttcccgtggttgccattgtaccagtccagcgcatccatatagctgaccagctcagtcagctgtttgggttgctcaatggtggtgctgacattatggaataccgcctgcaccagctttttctcatctgagcctaactgaaccagcaggttgcggtagaactgcatctgatcctggccaatacgcgatttcaggtcatcccagcggtagccttccggcaggtagtccgcttcctggccggtctctttgcacattttcaaaaacagcagcgaggcgagttcattgacgtagttttgataggagacgccgccgtcacgcaggttgtcgcacagtttccacagcttggcgaccagatcgttattgttcattgaagatcctatttgacatggcgaccaccattgtgggtcgcaaaagtgattgagcgtttcagatgcctgatggcgcttcgcttatcaggcctacagggttaggtgtaggccggataaggcatcgccgccatccggcgaaaacggggatgataccctcttaagccagttcgtcccagatgtaatcgctgaacttatccagcacgctgtcgaggttgtcatcaaaggtgcgctgtaacattggcttaccgcctcgacggtggaaattgccggttttgaagacgtcgtcgtcgagcaccactttctctttcagcgcctgcgctaaacggtcgagccagtttatctgctcgtcgctccagtcgttctcggccttgatacgcgccagcgcgtgatcgacacgctcgtcaaacggtttgagcgcatcgcccaccgccgcgcggcggatatggccgatcaggcgggcggcaatatcttcgttgcgcgtcgctttccacgcgctgcgcagggacgactcttcaaaatgctggcggtcaaaccactcctgcaattccaccagccctttacgggtgaggtcacgcgggcgattgatcaccgcctgcaacgcgggctgggcgttcggggcgtgctgcaccagcgcatcgaacgcttcgaggaaatcctgcggtgtgtcgtagtcgccgtacagcgatttgacgcttaccacctcatcgtcaatatcgaggaaaatgggggcctcacgcagggcgttgatatcggttttcagcctttcgagacgggcgataaagccgggaagcttattgaaaatctcggcgctccagtgcggccctttttcccgcaggcgcgaagccagaccaccaaagttaacgcccgcggcatccaggcacagttcgtccagacggcggacctgcttatctaccgcttcgctgcgatcgcggttatagatggcaagaccgataatccgctgcagcttagcgaccagctgttcatggctgtgttcggcaaaactgcggccatccgcttcgatggttttgtaggtttctgagtcggtaatttcgttgaccagcgtttgcagctccacctgcggacgcacaaccaccgggcgcatggtatcgacgctttccagcgagctgtagatatccacgcagtcgaaaatcttaaagctggttttccctactgacggacacagacgcgtggcgcggcccttcatctgctcgtagagaatgcggcttttgactttgcgcaggaacacaatattacagatagacgggatatccacgccggtggtcagcaggtcgacggtgactacgatattgggcagccgctctttgttaaagcggacgatcatgctttgcactttcttcgcgtctttatcggcatcaccggtgatcttgatgatcgcgtcgtgctcaagctgcggatactttttcttaaacgcgctacgcagctcgtcaaccaccatatcggcatgggcgttggtgacgcagaacaccagcgttttttgctgcccggtgggatccaggtatttggtgagctcgccgcataccgcgcggttaaacgccgggatcaccaggccacggttaaaatcggcgacctcaaaatcctgatcgtcggccagcgtgtcgttgatcagctcgccctgtgggttcaggcgttccacctgttcaccctcggaaagatagaccccgtcctgtgcgttgcgggtgacgatctgaatagggggatcctgatcgatcaggtaaccgtcgattaccgccgtacggtaggtgtagcggtaaaccggctcgccgaaaatatccaccgtgtgcagcgctggcgtggcggtcagggcgatttttaccgcgtcgaaatgatcgagaatgcgacggtaggcggaaacgtaatccagctggctacggaactgcagctcgccttcggtctgctctttatcgagaatgtagccacggtgcgcttcatcgaccacgatacagtcgtagcggccaaccggcatcggttcatcggattgcagcgtgcgcttgaccagtgactgcaccgtggcgacgtgaattttggtgctgtcttccgggaatttgtcggttaaccctttgatatcaaaaatgctgttaaaggtgtcgccgttaatgcgcgtgtcttcaaacgcccccagcgcctgttcgccgagcgagcgacggtcaaccaggaacagcacgcgtttgaaacgctgcgactggatcaggcggaacattaaagcaatggcggtacgggttttaccggtaccggtcgccattgccagcaggatgtgttgctgaccgtttacgatagcctgttccaccgcgcggacggcatcttcctggtaatagcgcaggccgagttcgctcattccgggattttcggcaaaccactgattttgtttctgcggatcgctgcccagcatatccagcagctcttccgggcgatgccattccggcagcgctttcgacatgttggtggtgtggcggacgtcgcgataccagataccgctcttggtcttcatcgccgcgcggtattcgcgcccgttggtggagtagcagaaggggattttaaagcgctgtttaccgctggtgtcctgccagctgatttcatactccggcacggcgtcatgcacttcgtcgggagcgtagtgctccagcagcgtgtcgcgtaaaaatccgttatcgaagtatttactgtagcggtaagactcgttgagcttgctggagacatcggtatttttgcgtttcgcttcaacgacggcgatgggcttcaggccaatgaacaatacgtaatcggcaaagcctgtttttcccgtttcatctgtacctgttggccattcggcaatcgctttattgacgccgggttccgggcgagcgcctttggcaaagcgtaacgttttgctatctgcctgccagcccgctttacgcaactgggcgtcgatcaggaagcgactctcttcttcattgagttccaacgtgcgtttgacagcctggtcggtgatttctttatgataggccttacgttcctgttcggtttgcttcgccagttcggcatcttttgctgcaagctgtgcctccagcgcggccagacgcgctttggtctgggcttcggtttcctgctgtttgccctcaaggatggcaatgtagccgttgagcgcaaccagtctttgctgctgagcttccagttcggcctggctttgtactttctcttgcgcctgacgttccagctgttgtttcagcgtcagcacttcctggtgataaagattctcgccgtgttctggcagaacaaacatcggcaccgggaaatcgtaatctttggtcaccagccggtagtaccagacgctgaggcggaacccgagccgcaggcacatctgggcatcgtccagatcgttatgaaattcgtggacggccaggttaccgatacggcgcagcttatggaaaacagaaaggatgctgtcatcaataaacgcaatcttgcccagttcgcgcagcaggtcatgctggttttcgcaggccggtatatccagcaactggccgagatgtttcgcggtggcttcgccaaacatgcgcatttttatcagagtggtattaggatcgtccggatagttgttttccgccgcgcaggcgatggcgtaaatgaagtcgttgacgcctttgagaaagtcgaagttagatttgttcatttttatctatccggttcctgagcgggaagacgttattaccctgtgccgtaaagggaaaataacagacccatggtagacttcatattgtgtgtgatcaacgaacaatcagagagtaactgcttctttcctaatgctttcctgaagagtatcgttctccggcggggtatctaatctatatcaatagcagggatggatttatggctgttccaacatatgacaaatttattgaaccagtgttgcgttttctggccactcgacccgagggcgctttggtcagagaagtgcgtgaagctgcagccgaaatgcttgggttagatgagcagcagcgtgcagaggtgattaccagtggacaactgacgtaccagaaccgcaccggttgggcgcacgatcgtctcaaacgcgccgggttatcgcagagcctatcccggggaaaatggtgtttaacaccagcgggaatgagctgggttgcctcgcatccgcagccgatgaccgagctggaagtgagtcattttgcttgtgattttaacggcgtaaagctcagtaagctggcagatgcggtggcgttagatccacagccagaatcgattgaggatgatgagcttgccagaagcagcccggacgatcgcctggagcaagcgctcaatgagattcgtgaatctgttgccgaagaattgctggagaacctgcttcaggtttcgccggcgcgttttgaagtgattgtgttagatgtgttgcaccgcctgggatatggcggccatcgcggtgatttgcagcgcgtagggggaaccggcgatggcggcattgacggtattatctctctcgataagctcgggctggaaaaagtctacgttcaggccaaacgctggaaaggcaccgtcgggagcgctgaagtcaggggcttttatggcgcattgcctgagcaaaaagtgaaacgtggcgtctttattaccacctcaggttttacggcgcatgccagagactatgctaacaaagttgaaggtctggtgctggtggatggcgacaggctggtgcatctgatgattgataatgatattggcgtatcctcacgtttactcaagttgccaaagctcgatatggattactttgagtagtggtaacgctggaacctgattgcgggtaattgagatggaccacgttgtgggcacctgtgtttcctctcgcccagaaatcacgtgactttctatggctgcgtatcagcctaaacccatgccggatagcggctgcgccttctgcggcctactcttctggtcaatttccttttatctcgaatacacaaattgtgaagctatttccaacaatccaggtataatcgtaagataattgtatatacatttttgtatgtacaattagggaaaacacatgccgatggagtttgaatgggatgcgaacaaggctaaaagcaacctgaggaagcacggtgtccgttttgaggatgcggtactggtgtttgacgatccccgacacctgtcacgtcaggagcgttatgagaatggagaatatcgttggcagaccctcggccttgttcatggcattgtggtcattctggttgctcatagcgttcggttcgaaagtggttttgaagttatccgtatcatcagcgcccgcaaggcagacagaaaagagaggaatcgttatgagcatggttaaacataaacgcggcaacgcatccgcgctgagtgctcagcatgaggctgaactgaaggcgctggcgaaaaaatcagatgatgagattgattacagcgacattcccgcttcggaggatgggcagtggtctgaagcagtgcgtggtaagttttttcgcccgttaaaaactcaggcctcggtgcgtattgacgccgatgtgatggagtggctgaaacggccaggaaaaggctaccagacgcggctcaatgccattctgcgcgaggcgatgctgcgcgagcaaaataagaaatagcccgaagatgccggatggcggctgcgccttatccggcctacaaattcccgccaggccagataagcgcttaatggttacttccttaaccccacaaatgccgctctgatctcgtcttccggcaactggatcccgataaataccagcgtgctgtgcggcgtttcgtcgccccacggtctgtcccagtcggcgctgtagaggcgctgcacgccctggaacagcaggcggttgggttcgccgtcgatccacagcatccctttgtaacgcagcagtttatccgctgattccagcagcaggttttccatcacccgcgacacctcgctgatatccaccgggtaatccagttccaccacaattgacgatacatcgttctgtttatcggcaataaagtggaaacgcggttggcttgccagcacgttctcttccagcataaagccgctggtattaaacaactgactcaggtcaatatcgccgtgtaccacggtgtaaaccggggcgcgggcgttgatacgcgccagccgctcgcgcagtttctcgctgtcgcctgccacgtcggttttggtcaacagaatgcggtcggcgtagcctatctgcgactgggctatggtgaactgattcatctgctcgttagcgtgcaccgcgtcgaccagcgcaatcacgccgtctaacaggtagcgttcgcataatacgtcatgggagaaaaaggtctgaataatcgggccggggtcagccatgccggtgcattcaatcaccaggcggtcgaaagcaatatcgccgcggtcgcggctgtcgagcaggtctaatagcgcatcttccagctcgttggagcgggtacagcagatgcagccgttagtcagggttttgatctgtgtggcgcgatcgccaatcagttgatcgtcaacggagacttcgccaaattcgttttcgataacggcgattttaaaaccatgttgttcgttgaggatatggcgtagtagggtggttttgccggcaccaagaaaaccggtaagtagggtaactgcaatcggggtcatagtctctccattaacaacagcgcataccgcctttgccatcgccgccgtaacgtgcttgctgacgttcgcggaagaactcttcataggtcatgtacggcttgtcgggatggttggttttcatgtgctcgacatagttgtcgtagtccggaataccaatcaacatttttgccgcctggccgagatatttttttgcctgacctaaagtatcaaacattctgccgtcctgttaatgaataaagccggatggcggcttgcgccttatccggcctacactagccggggtcgctgtgcgctacccggcatcagttttagtggtgtgaagagatcttcacgccgccttccggcacaggcacatacggggtttctttgtcggtacgtttatcgctgttgcgtaccttcatccaggtggtgaaaccgtagaagataatactgtacaccaccaccaggaacagaatactcaaaccagcgttagtgtagttgttcaccacgatatggttcatgttggcaatctgctgctcggtcaggttggcgccgttggcaatcttctctttatacaggtttgccatgtagaagaaaccttccatctgtgggttggcgctgaacagtttcaggcccagcgcccaggtggtgcagatcagcagccataccgccggaattaccgtcacccagatgtatttggtgcgctgcattttgatcagtaccacggtgctcaacaccagcgccacggcggccagcatctggttagagataccgaacaacggccacaggctcttcacgccgcccagcgggtcgaccacgccctgatacagcagatagccccacaaaccgacgcagcctgcggtaccgatgatacccgcgaccagagaatcggtttttttcaggaacgggacgaagttacccagcaaatcctgcaacataaagcggccggaacgggtacccgcatccagcgcggtcaggataaacagcgcttcgaacagaataccgaagtgataccagaagcccatatccgccatcggcaggactttgtggaacacatgcgcgatacctactgccagcgttggcgcgccgcctgcgcggttcaatactgacggttcaccgatatctttcgcagtttgcaggatttgttccggggaaatcacaaagccccaggagctgacggtcgccgctgcatgtgcggtaacgtctttcaactgcgccataatcagcggcgcgttctcgccgcccatctcgtgcaggtttggcatggtaatgcccagacctgccggcggggtgttcatcgcgaagtagagacccggttcaatgatcgaggccgccaccagcgccatcaccgcaacaaaggactccatcagcatcgcgccgtagccgataaaacgcgcatcggtctcacaggccagcagtttcggcgtggtgccggaggagatgagcgcgtggaagccagagacggcgccacaggcgatggtgatgaacaggaacgggaacagagcgcctttccacagcgggccggtaccgtcgacatactgcgtcaatgccggcatttttagttccgggttgaggatcacaatccccagcgccagaccgacgatcacgccgattttcaggaaggtagcgagatagtcgcgcggggcaaggatcagccataccggcagcagcgcggaaacaaaggcgtagccgatcagcgcgaaggtaatggtggtgtctttaaaggtcagcgccgggccccagtaagggtcgtgggcaatcacgccgccgaagtaaatagacgccaccagcagcacgataccaataacggagacttcgcctacgcgtcccggacgcaggaagcgcatgtagatgcccataaacagcgcaatcggcaccgtggagcagacggtgaagacgccccacgggctttcggccagcgctttaaccacgattaatgccagcaccgcgaggatgatgatcatgattaagaagcagccgaacagcgcgatggtgcctggaacggtacccatctcttctttgatcatctcgccaagagaggcgccgttacggcgggaagagatgaacagcaccataaagtcctgcactgcgcccgcgagcaccacgcccgccagtaaccacagtgtccccggcagatagcccatctgcgcggccaataccggcccgaccagcggacctgcgccagcgatggcggcgaagtggtgaccaaacagcacgtagcggttagtcggcacgtagttcaggccgtcgttattgataaccgccggcgtcgcgcgcgtcgggtcgagtttcatgaccttctgggcgatgtacaggctgtagtagcggtaagccaccagatagacggaaacggaagcgaccacgatccacagggcgctcacgtgttcaccccgacgtagggcaacgaccgagaggcagaaagcaccgatgattccgagaatcacccagggtatgtgcttgaatatctttttcgtatccatagtaaaacctggttgtaagtttaattatcagccgaagctgggtggacattgagttcgtgtttgaggaggtagattgactgctatgctgagaggatcttgccagatcatcgtgcgcgtaaagttaggtaaatcagtgagtggttgtatggcggtttaagcggtcggacgtaccggtaagcggtttcgcggaggagggcgtgggctattttatgtgattgagatcacgatataaaatgggacgatccttgttgcgcggggcgtcataacgacttcactgagctaatcgtgatattaatggcgcgcatcccataaagttttccctttccaggccgaaaattctgtatctgtctagcggaaagagaaaacatgttaaagcgaattaaaattgttaccagcttactgctggtattggcgctatttggccttttacaactgacatccggcgggctgttcttcaactcgctgaagaatgacaaagaaaacttcaccgtattgcaaactattcgtcagcagcagtctgccctgaatgcaacctgggtggagctgttgcaaacgcgtaataccctgaatcgcgcgggtatccgctggatgatggaccagagcaatattggcagcggcgcaactgtcgctgaactgatgcagggggcgaccaatacgctgaagctgaccgaaaaaaactgggagcagtatgaggcgttaccgcgcgatccacgtcagagtgaagcggctttccttgagatcaaacgaacctatgatatctaccacggcgcgttggcggagcttattcagcttcttggcgcgggtaagattaacgagttttttgatcaaccgactcaaagctatcaggacgcttttgagaagcagtacatggcctatatgcagcaaaacgatcgtctgtacgatattgctgttgaggataacaacagttcctacaaccaggcgatgtgggtactggtcagtgtgctgattgccgttctggtggtcattatcgccgtctggttcggcatcaaactgtcgcttatcgccccgatgaatcgtctgattgaaagcattcgtcatatcgccagcggcgatctggtgaagcgtatcgacgtggaaggctccaacgaaatggggcagttggctgaaaacctgcgtcatatgcaaagtgaactgatgcgtaccgtgggcgatgtacgtaacggcgcgaatgcgatctatagcggcgccagcgagattgcgatgggcaacaacgatctctcttcccgtactgagcagcaggcagcgtctctggaagagaccgccgccagtatggaacaactgaccgccaccgtgaaacagaacgccgaaaacgcccgtcaggccagtcacctggcgctgagtgcgtcagagacagcgcaaaaaggcggcaaagtggtggataacgtcgtacaaacaatgcgcgatatcgcctccagttcgcagaaaatcgccgatattatcagcgtaatcgacggtattgctttccagaccaatattctggcgctgaatgcggcggtagaagcggcgcgcgcaggcgagcagggacgcgggttcgcagtggtggccggtgaagtccgtaatctggcccagcgtagcgcgcaggcggcacgggagatcaagagtctgattgaggattccgtgagccgtgttgatgtaggttcgacgctggtcgaaagcgccggtgaaaccatggatgagatcgtcaatgcagtgacccgcgtgaccgatatcatgggcgagattgcctcggcgtctgacgagcaaagccgtggtatcgaccaggtgggcctggcggtagcggagatggatcgcgtaacgcagcagaacgcctcgctggtggaagagtccgccgccgcggctgcggcgctggaagagcaagccagccgtctgacccaggccgtcgcggtgttccgtattcaccagcaacagcagcgtgcgcgtgaagtggctgcggtaaaaaccccggcagccgtgtcgtcaccaaaggccgcagtggccgacggcagcgataattgggaaacattttaagggcgtagtggtgaacagtcggcctacagacgaccgtaggccggatgagatgttcacacttttgcctgatggcgtagcgcttaccaggcctggcagtccgcgcaggccgattttaaaccagcatcaggcgcatggtgcagcgtgattcatacgccaggccgtgcgccgcttcctcctctcttttctgatatcgcgcgctaatccaacgttgagtgaaggtgtgcggtgatccacaaaaaatgaataaagcgagagaacgcacggcaggagagccttgtttcgcggcatcataattgctgatgtgataatcgtgagaggatacgatgcgcaaagatgccctgcttgctttcctgatgaaccaaacggatttttttgatccggaaaatgtcagtgaggtgtttaccgcgcgctatctggcgcagcgttttaatatgcagcgcaataccgccagccattatctgaaccaactggtggcgcagggcgtgctctgcaaaatcaatacccgtcccgtctatttcctgcataagcaggcatttagccaacagttttttaccctttcgcgtaatgaatacgccagcgtcgcggagctgttagcgcacggggaacaggagtgcgcgccggacgatcacttttccctgttgattggccataacgaaagcctgaagcgcccgattgagcaactgaaaaccgcgctgttttatcccgacggcggactgccgctactgatgaccggcgaaagcggcaccgggaaaagttatctggcgcagctcatgcacgaatatgccatcgcccaggcgcttctgtcgccggatgcgccatttatcagttttaattgcgcccagtatgcgagcaatcccgaactgctggcggcgaatctttttggctatgtgaagggcgcgtttaccggcgcgcagagcgacagaccgggcgcgttcgaggcggctgacggcggcatgttatttctggatgaagtccaccggctgagcgccgaagggcaggagaagctctttacctggctcgatcgtggtgaaatttatcgggtaggcgacaccgcgcaggggcatccggtttcggtacgtctggtatttgcgacgaccgaagagatacacagtacctttctgacgacatttttgcgacgcatcccgattcaggtcaacctgccggatctccagcaccgtagccgccaggaaaaagaggcgctgatcttactgtttttctggacggaggcgaaaaaactttcggccacgcttatcctcaaaccgcgtttgttgcagatcctcaatcagtatgtttatcgcggcaacgtcggcgagctgaaaaatgtggtgaagtatgcggtggcgacggcatgggcgaaaaagcctgggcaggaaaccgttaccgtgtcgctgcacgatctgccggatgccatgctgtcggcattgccgtcactgaatgaaccgctggcggacgacacgccggtgagcatctcgcccgacacgaaccttacctggctgctgcgcgcccgcgacgagatgcagggcatgatccatgatacgcagtgtcatgtgctggcgctgtacgagctggtacgtagcgggaaagaggggtgggagacggtacaaaaaagaatgggcgatgaaattgagaccctcttcgatcgcctgatttttaccggcgacgataatgtgcactcacagcggttgctgttaattacaagccaggtgcgggaagagttttatcgtctggagaagcgcttcaatatgcagcttaacggcaactgtatttacgcgcttagccactatttaatccatcgtaccgcactggcgccttctcgtctcaacagcgagcagatccgccaactggacgccttcctcgcccagaaatatccgctgctgtacagcttctgtttacaaattctggagacgctgggccagaagctggatctggagccgagacgcattgatatgctgctgctggcgctttggctgcataaacagggggctaacaaccaaaaacaggtgacgcatgcggtgattctggcgcacggctatgccaccgccagcagtatcgccaacgtcgccaaccggttactgaaaaatacgatttttgaatcgttcgatatgccgctggacgtcacgccggaggcgatagcgcagcaggtgatgcgctatctggaagagcatccgctcgcctccggcctgatgattctggtggatatgggatcgctcaaggccattcatcgtcattttgatcgcgcgctttccacgccggtgacgattatcaacaacgtctcgaccagcatggccctgtatgtaggggagcgtattttacaggggcattttattgaagagatcgctcgcgatatcgcccgggatgtgccggtcgagtatcagctctactggccgaaaagcaacaaaccgcgcgccatactgaccacctgcgcgaccggtatcggtgtggcgacgaatctttgcgcattactgagcgccagtattccgcaggcgctggagattgacgtcgtcgcctgcgattatgcgatgctggcgagcaataaaacccaggagccggtatttatgcgctacgacgtactggcgatagtcggcacgctggacccgcacatcgccagcgtgccgtggatttcgctcgactcgctgatctccggcgaggggaatcactatctgatgcggctgtttggttcgctgaccacgccggagcaggtggcggagatcaacaacctgctgctgaaaaacttctcgctccgacgagtgatcgaatccgtcaccatcctcgacaccagcaaagtcatcaaccacgttgagcagtttctgctgcgctatgagcatctggcgggcgttaccgtctcgaatgaaagaaaggtggcgctctatgtgcatattagttgcctgattgagcgtctgatccgccatgcgggcattactgcctggagtgggcaacagtgtccggaacaggaactgaatcggctacgggaagcgtttagtgtcattgagagtaactacagtgtcaaaatccccaccgccgagcttggctatattcataatatcctgaccttcgaaacagaacttatcgagcaagatcaacagttttaactatttccctctgttaacccgcatcttttttcggcgcgccactttttctggcacgccgcttgctctcttttatcacagtggaatgtgttttagaggtcaggatgaagagacattatattttcgccagccacggcacgctggccagcggagttttaaactccgtggagctgattttaggcaaacggtcaaatgtctggacgctgtgcgcttacgttgaagagagcgtggatttaagccagcaggtagatacgctaattgcccggatcccgccggaagatgaaattattgcgctgaccgatatttttgccggcagcgtgaataacgaatttgtccgttatttatcacgggaaaattttcatctgctggcagggattaacctgccgctggttatcgatctctttatgtcggaaaacgatggcaataccacgcataccataatgacggcgttagcggattcaaaagaaaatattcagtactgcaatcaaactatcaccagcgccatgcaaagcgataaagatttttaaggggaggaagcgtcatgattgtttttttacgggtggatcatcgtttattacatggacaggtcgccttttcctggacgcagtacgttggcgcagactgtattttaattgccaacgacagcgtacctaatgatgacctgcgtaaaaccaccattaagatggcgaagccgcccgcggtgaagctggttattaaaaatattgccgattcaattgaagcgataaaaagcggcgttaccgataaatataaactttttattgttgttgaatccgtggcggatgcgtaccggctggcgcgcgaattacccgacattaaaagtattaatttaggcggcacgaaggtacgtgaagggagccagaatattgctaaagccatcaatctgttagcggatgaaatgactcaacttcgggagctggcggctggcggagtagagatagaaattcggctggtgcctaacgatcgtaaacaactttttgcctgagcggataccctcctgaggacatattatggtagaggcgcttttacttggactggtggcgtttatcgcccagtctgaatatgcattagggacgtcgctgatttccagacctatcgtgaccggacttttaaccggactggtgctgggcgacatggaaaccggaattgtgatgggcgcgacgctggagttggcgtttatcggttccttttcggtgggcgcgtcgctgcccccggatgtggtcactggcggtattttaggtgtggcctttgcgattaattccggcgctggggcggaaaccgcgctgttattaggtttgcctatcgcgacactggcgttaattgtgaaaaatatctataacggaatgtttattccgttgctctgtcataaagccgatgcttacgctgaggtgggggatacccggggcattgagcgtatgcatttaatctccggcattgggctgtcgctgatgctggggattatcgtcacggtctcttatttagcgggcgtgaatatggttaaaggttttctggatgccattccagaatttattaaacatggattaagcgttgccaccggtattattcccgcgctgggttttgccatgctggcgcgcttattaattaataaaaaggtcgccccctattttttcctcggttttgttttaatggcgtatttaaaaattccggtgacgggtattgcgattctcggcgcgatcgtcgccgtcgtgatggtcaatatgccgaaatttgcggcctcgcaaccggcacctgcgcaaggagcgtctcatgacgatgaagatgatttctgataaagaccgccagcaggcggaaaccactggtctggtcaccgcgcgtgatttacgccgcgtcttctggcggtcattccagatggagttttcctggaactatgaacgacaaatgaacctggcgttcgtctatacgctcattccggtattaaagaaactgtatagccgaaaagaagatcttgccgaagcgctaaaacgccatctggctttctttaataccacgccgcacattgtgacgttgatcctcggtattaccgtggcgatggaggagaaaaatagccagcagaaagagatggacgccagttctatcgataacgtcaaagcgtcgttaatggggccgctggcgggtattggcgactcttttttctggggaacattgcgtcttatcgccactggcatcggtaccagtctggcgctgaaaggcaatattctggggccgattttatttctgctggtgtttaacgtaccgcatattctggcccgctggttctttacccgctggggctatgtgctgggaaccggcgtactgcaacgcattcagcaaagcggaatgatggaaagcctaacctatggcgcctcgattatcggtctgatggtggttggcgcgatgacggcctccatgattgatatcaccattcccattacgtttggtacgggagaagcgaaaacccatgttcaggacattattaacgacatcatgccttgtctgctgccgttaattagcttcgccattgtgtactggctgttagggaaaaaagtgaaaccgttaaccatcattggcggtattgcgctggtgggaattttcggttcctggatagggttattttaagagggatacacaatgtcaccaaccatgctgacctatattaacgaagagtctgacgtcctggcgaatattattcgccgccatcgccagtctctggaagaagtatcgcggttcgccagccaaaaaacgttacgacgaatcctgatattagccaccggatcgtcattgaatgccgccttttgcgcccgttatttctttgggcgctgcggtatctctatcgatattaaagagccgtacacctttagccagtatgagaatagcgatccgcaagccgatatggttattgctatttcccagagcgggaaaagcgcttctaccctggaggcgatgcgtaaagttcaggcgcagggacgtccggtattcgctctgaccgccgatccgcaaagccctcttggcaaggccagtgattatccactggatattctgaccgggattgagtccgtcggctttgttacccgtggatttagcgcgacggtattgaatctgttgcttatcgcgttgttaattgcccgtcagcagcagcgactgacggaatcgcaggtcgaggagtatgtggcgcagcttcaacgtatcgcggcaaccctgccgttggttatcgtgcgtacggaagcgtttattcaccagcaccaggccgttttacgaaacgggacgcgttttgtggcgacaggctacggcgcgctggttggggtggcaaaagagttggaaactaaatttaccgagacggtgcgtgttccctcaagcgggtttgagctggaagcctatatgcacggcccgtatctggaagccaatgcggaacacgtgatgttcttctttgaggaccggcccgacgcgcgctccagggcgctacgggagtatatgacgcctgcggtcgccaaaacctttactctcacgctggcgaaggcggcgcaggatgaccagacgcttgcgctggatgtagcggttgatcaccatttctcgccattactgttgattgtgccggtacaactcatggcgtttcatatcgcctcactgaaaggcatcgacctttcggtacgcatttttgacgatttcgatcgcgttttaaaaagtaaaatctgaacaatcaggagaaaaatatgttgggttttaatcaggacgagtacctgacgagtgctcgtgagatcatcgctgcgcgccagaaggcagaacaggttgctgacgagatttatcaggccgggttcagttctttatttttcgcctctgttggcggttcactggcgccaatgatggcaattaatgaatttgccaaagaattaacaacgttgccggtttatgttgagcaggcggcagaattaattcataaaggaaataagcggctgaataaagactctgtggttattacgctgtctaaatccggcgataccaaagaatcggtggcgatcgccgagtggtgtaaagcgcagggaatacgcgtagtcgctattaccaaaaatgcggactctccgctggcgcaggcggcgacatggcatattccgatgcgtcacaaaaatggcgtggaatatgaatatatgctgctgtactggctgtttttccgcgtgctgtcgcgcaataacgaattcaccagttacgatcgcttcgccagccaactggaaattctgccggcgaatctgctgaaagcgaaacaaaaatttgatccgcaggcggacgctatcgccagccgttatcataacagcgattatatgatgtgggtcggcggcgcggagatgtggggcgaggtctatctgttctccatgtgtatcctggaagagatgcagtggaagcgcacgcgccccgtcagctctgcggaatttttccacggcgctctggagctgctggaaaaagacgttccgctcattctggtgaaaggggaagggaaatgccgcgcgctggatgaacgcgttgagcgttttgccagtaaaattaccgataacctggtggtgattgatccgaaagcgtatgcgctggacggtattgatgatgagttccgctggatcatggcgccgtgtgttgtttcgacattgttagttgaccgactggcggcgcactttgagaaatataccggccacagtctggatattcgtcgttactaccgtcagttcgattattaacagaaaggggcgtgtagcatatacagtgcctgatggcgcttcgcttatcaggcctgtgcgccagtttatggataaagatgatgtgtaggccgggtaaggcgcagccgccacccggcatatatgacattctcttttaactttcaacattcaccactttgatctccaccatgccaatccccaatttgcgcggcgaatggcccaaaatattaccttcgttggtggagacgggagcgggcggcgcaatgactaaggtattcgcgtccgtcgggttgttgaaatgcagcgtgatagtggacacatcgtgacccagcaccagcgtctgttcttcgttgcctacgcgtaccggaatcggtcgattcgcgttgtcgccgaaggctttggcggtgatcaccagatcaaactttttcggcagcggcgctttatattcgattttaacctcatcgcccaactgcgcatttgaccagcgcccccaggactccggccgggaaatgccgctaaactgcttcacctcctccggggcgcccgccacgttaaagataaagctatcggctttataacgaatatcgttatcgacaatctttaaggtatcgacgttgcctttgtagcgctccatatcgatcatcgtgtctttaaacgccgtcttaccctgccactgcgctttatcaacatgctgtacggtttgctgcccgccaagctgcccctgcgagacgcaccagtcggtagagagcgccagcgccggcgcccatagctgcgccattttgtagcagcgatcgatccaaacgaaattatcgcgcggggcgaagtcggccaactggaaccgtagcggagcggagtattcactttccggtaacggctcgacgcgcttatccgatacgcgcagtagtaacggcaggcggaagtggctcccggaaaacgcgatcatgtttttgtcccgatcgacggtaaaatcttttatctctttcgggaaattccacaggcgaatgatatccggcttcatcgccagcactttctcttttacattcaggaacacttccgacagcgactgcccggaaaggctgctacgtcccagaccgataaaattatcgccgccgagaatatccagcaccgttgcgccgttgtccatcgtgttgcgtttgaccgccagagtctcctgctgtggtttatcgccgcgcagaatgaaaaacagattgttgcgatcttgcttattcaggtatttccaggccgtattgttcatcgccagatggtcggaagagacgacgataacggtatctttaaaccacggcgacgctttgattttgttgataaactcggcgatgttttcctggctgcaacttacggcgctaaaggactggttgggcttgccgtcgtaatcgtagcgtttgcggttgcaggtgcgtgagataaacccgtccgggtggtgagtatctacggtcagcgtaaacagcgaaaaacgctggcctgagcgggaaagcgcttcaaatttcttccatgcctcatcaagcaccgtatcgtcgtagaagccccagtcgttacgataagacgggtccgccaccaccgtttttagctcttcagcgccgtacagatgatcaaatccgtgtgatttcaggaacacgtctttcccggcaaaacgcaggttagcgccctgcacgaaatagttctggtagccggagtttttcagaatatcgccgaggcagatattctgcgggaagaagctagaaaccgacgcggacgcattgccctcaaacggcgcaaacagcggaataccgcactgggaagccaccatcccggcgatggtgtaatccgttcccggcagttgcatggtatggctgaaatccagcccctcatttttcagcgcgcccaactctggcgtgagattggggaacgcgtcattatcaaaataggtccgttccaggctctcgccgtagatatagaccagattgagcttcggattaggaatggtttttgctggttctttataataaacggcaaaatccggatcgccatcgcgcatttgtgattttaccagttcggtaatctggcgaaacgccgggctggcgtcgaccgaacctaacgccagcagtaacgccagcaggctgtaaccgacatgatgaggatggtgacggcggcggcgtagtacccatcccagcgcgccgaataccgccactaacgccagggcaatgccgattcccggcagaatatatttgccgactcccgctcccgtcagactattcgtgagcgtataaagcactgcgtcgttgatcccgtcgccggtaaaatagtcgctggcatacagggtaatattcagaatgacaaaaagtcccagcaccgtgagagtggcggcaaaccaccaggtgttacggcccgccttccaggcatatatcagcacagaggcgagaaacagagcgacagagagcaactcggacaactgacgatcctcaataaaccaggcttatcgctggcaggaaaaaatttctaacaatgtaatagcgatgtcacattgctgcaattctaataactttacacggcgctgttatttagaatgagtttagaaagttggttttttgatcggcatcacttcctgccatagcggttaataacaggaaaagacgaagagaaaaatcgggttaatgccgtgttggcgggtaaagggccaaaacacggcgtttatcagggcgtcccggcgtggcgcacggtcagaaaaacgcagtcaggagaggaaattcagcccttgctgcaacaccagatcgcaagctttggttttcaccttttccgccagcggcgtactgccgatattattgaggttcaactgctggccgtccttcgtcttgagcaacccttgcaggccgttcaggtagttagtgtcctgctcctgctgtgtggtatccaaccccaacttgttcagaatctgatttttaacgttttccacgttggtagcggacgccagtttctgtttggcgcagtactgcaaaataccggcggcattattcatattatcggcgctgagcgactgggcacctctgctgagcagaccggttagcgcagaaagcgacatcccgccctgctgtgcgttcgcgccctgagcgcttaactgactggcggcaataccgctggtggaaatcagtacgctggcgatcgccgcgcagcacagaacatgtttcgctgtattcatggtaatcacctgtgttatgccagtcaggcgtcgtatcgccctggcgcacgttgcaatttaatactctttacccgtcacccggctgcggtaactgtcccaggtaaaattaacccataaactgttgccgagacgcatacggtccatgacgcgttcgccaagcattttcgtcatctcttccatattgctgttcgtcaacatgccggtgggacgttttgacgaggaacgacgatcgacaatttgattgatgatcactttttcatagcgggattcggtctgcacgccgatctcgtcgatcaccagcagatcaacgttactcagatcgttaagcaactgctcttcgctggtttcccgattgctgaacgtgtctttcatcgctgacataatatccgctacggtgataatcagtaccgactttccgcgcagcagcagctcgttacaaatagccgcggcgagatggtttttaccggttcccggcttgccggaaaagacaaagctggcgatattgccgtcaaactcatcaacgtactgtcgggctttgcttaacgcgttcatttgtccgtcgcactcaacccgatagttatcaaacgaacagttctgatgcagcggtcgaatgccggaacggttaaaggtgcgctgcattttcatcgcccggttttcccgcgccagcgctgccgcccggatctcgccttgctctttctgccacgccagcaattcttcgcccgttttaaacgccggcgtaatatgcgcaggcatcattttttgtagacgctgcatcaggtcgccaacatttttcatcgttaccccctaaaacctggtggaatatgattgtcaggttcgctgacgctattgatgtcgcgctgcggcattccgccattgctggaacggctgatttgcacgctgcgcgccagcttttgctgccactggatatggtgaaaaaccttaccttccgcctgccagtaggcgataaacgccgccagctcttctgcggtgaccggctcccgaagcgccacgccccaaagggcagcctgacgctgaaaatccgcatccggttgccaggcgggatacatggcgaattttccgcagggaatcgcaacgggggcggcttcgggttcttcgtaaaattgtgcgtctaacgccacatcgcttcccggacgtgataacttttcttcaagcgccagcagttcagccatgcgtgcaggcgtcacggcataaaaggcaggcgcattattagcgaataccgccactgcgccgcccgttgacttcgccagcacagcatgatgatcgtgtaaaaggacgtcaataccgatgacgtccgacgttaaaattctggaagacataatgtttctcaatatggaacaacaaccgagaagggcgactgtttttatagtaccacacagacctgtaagaacagcaggaggcgttccaccaatcacacgcgggggcgtttgcggtacagccataatcccggtacagagaggccaattgagagcgcgccaacaatggaagaggctttcagaaaattggtcagcagcgtaatcatcatcggttcgctatagcccagatggctaatttttactgcggaaatcatcgcggtataggcggaaatccccggaaacatcgggatcacggccgcgacggtaaacactttagggtgagcgagataccagcgtgaccactgaataccaatactgccgaccagcagcgaagccataaacgttgaccattcgatattaaaaccagcgctcatcatcagcatacgcgagccatgacccagcgcccccagtagcgcgcaccacggaagcgcccggtggggaacgttaaagaccatcgcaaacccgacggcggggatcgcagacaagatcatgtcctgcattagcgccagtaaaaagtcgattatacccatcctcgtagcccccatactgtcattgacatcactacgcccacacaggtggccagtgtcaacaggctggcgatagcccagcgcgccagcccggtattaatatgtcctttaaacatatctgcgacggaattaatcagcggaaagcccggcaccagtagcagtacgctcgccgccatggcgatagtgggcgtctggctaaaggcgggaagggtgagcatcagcccggaaatcgtggtagcgacaaaggcggtaatgcaaaaattgatctgcggatgtaaatgccgctgcgccagcatctggcggatatacatggctatcatactggcgaaaaaggtgataaccgcgccatcccagccgccattattcagcttacaaaagcaggagcaggaaagaccgaccataaacgccaccagccagcgcggataacgcagcgggcggagctggctaaagcgtttttccacgcctttgtaatccagcagacgatgttccgcgaggataacgatatgctgaacctccgtgacgacgtgcatattaatgccgcgatcctggtttttacgtgtcgatgtcagacattgtccgtctttaatggtcgtcaggacaatggcgttagaggagatcgcgctttcgacgctatccataccgagcgccaaaccgagtcgggtggaaagctcatcaaccagtgcgctttccgccccgtgctgcaataaaaacagcccgcattgaatacataaccgtgttactgctcgttgaattgattgctcttcttgcatgactcgtcctgtccgaaaagacattctatgcgccgccactatgacagaggcttcctttttaacacgaagcacaggcatgatggcgttggttaagatcaatttcttgttgataaaaacgtcaaccgccagacgcaacgcataagcttcctgagacgtgcgcttcgtcacaggcaggatatccttatgggcgacggttctcgtatgtccgtttccagaatagaggcattatgccagcctggccgctcatttttgaatcaatgatgtggtgaattttatcaacgatatgcattaatggtttaacaacaatggcgtgagtagcgggcgtaaaattaggcatgacttagtataattcgcagatattacatgagttttatggatggtagacagtattgttgggcttttgttttaggactcagcaatatgaatgaagggcgaactcatattttaaatttattaatatgatgcgttttcgttagaattactaatgtgcaaatttagttaatttaattgtcttgcttctggttttatgagtaactatgcgatagtgatttcatgtttttgtgctatgtggattgtagcgcaatcaatgttatatttttaaaaataaaacaaggataattaatccactcggcttatatttctttgcgctcattgttaatagtgtttttattaatggggcaatgaaaagtggcggcgtgggtgcggaggaattatgctgccaggatgctgcaaaaatggacttattatcagtaaaacccctcttatacaggaaggccttaaaggggctataacaggtaatttccccgattataaactggcgtattgtcgtacgatagaagagctaacgctgctacagctacgccgaagtaatttagttattgctgatttagcagttaacaatgcctctccccgcgctatctgcgaatatttttatagcttactctcgcaatatcgcgacatacattgggtatttctggttcctaaatcctgctatccacatgcggttgatctcctgatgggccccgtcagcaccttgctttcagacgaagagccaatcgagaatcttattagcgttatccatgcgggaaacgctcgctcagaaagaataagcaaaacattattatcgcctcaggtaccgtctgaaattcagcagtcccacgacaggccgattgtccttacgctgtctgaacgaaaagtattacgccttttaggaaaagggtggggcattaaccaaattgcggcgttacttaaaaaaagtaataaaacaattagcgcccaaaaaaatagcgccatgcgacgcttatcaatacacagtaatgcagagatgtatgcatggataaacagttctcagggagccagagaattgaacctaccttcggtatatggagaaaccatggaatggaaaacagaatcagcaagagaaatgttgcgctcgtagaaaaatgcgtgatgagcaccattggtattaaagggctatttgatgcaatgccggattgccgacatacgcttcatattttttcaaaaccatccgcgttttataaggctgcgctaacgacgccgttttctgccgttattttttctctttctgcgttaagaactgaacgccggacaggattatccagcctgacggaactggcgataaattatccccatatgcggcgtctggtgattgccgatgatgatgctgaagctcgcttaatcagcgcgctatccccgctgccgctggatggggtcatcagcaaagcgtcgccgttggatgttttacaggatgccttatttacatcgcttaatagcgcccgacggacaacggagcgtacagacaatctttgggagcttcaccagaattgtatgcttagtccaaccgagcgggagattctgcgttttatgtcgaacggctactcaatgccgcaaattgctgtccagttagaacgtaacattaagactatccgagcgcataagtttaatgtgatgtccaagctgggcgtgagttctgatgccgggttactcgatgcggcggatattctgttatatctgcgcgccggcgatgctaccgcgctccagcatcgggtatagcccgcgccggatgcgccgtgcttgttcggggaatcagggtgccaggcacgttattggcacacgtctacccaggtcgccgatgtcagttcagccattctttccggcgtgatgcgtaccgcgctgtgcgtggcgcctgcggcaggcaatacttcgttataccccttcagagagatgtcgcaataaacgggcagcgggtgctccagcccgaaaggacatacgccgccgacaggatgtccggttgcattgaccacttcatcgctgctcaacatacgggcttttgcgccgaaagtggttttaagcttcttattatccaggcgggcatcgcctttcgcgaccaccaggataatggtgtcttttactttaagcgagagcgtcttagctatctgccctggctctacgttgtgcgctttggctgccagttcgacagtcgctgtactttgatttaattcgataatttcaatatcgggagcatgatcggccagaaattgccgtacagattgcagactcattcttctctcctgagaccttaccaatagccacggtagacccaaaaatggcaaaacgtaatttggcatacggagagcgccgctgtaaatataataatgtgacaggccagcagcagtaagccgtgacgataactgaaggcaacgtaaagcggtttactttagcgtgcagtcgccgcactgctgtacgtcaggtaagcggtaacgttggcagcaggttctgcgtaccagaagaccgtcgcgcattacgacggtccgccacagcgggttatcctgaccgtcggatagctgcttttcaaaaaaacagcgctggcgtagcgttgccagcagggcttcgccaagcagcggtttcatctcagtcagataccagttgattaaataaccggtattgctccagataagtttcgcgttgatgtcgccagtcgcctccagcgcctgaatgaccggctgtagtgcggagactattagcgtttccattcgttcttccggggaacgctccgttgccaggttatcctgatgcacatcaagccagaaacacgcggcgcgcccggtttcatgaaattcaacgtgaatatgttctgccgagacattgatagcgcgcgcttgcgtcagtaatgccagcatcagcggcggcgtcatcagcccgatataccattgcgcccatagggagagtaacggcttattttcacgtggcaggcctggcgtgtgccgatagatgtgatcggaataggcggccagcaatgaacgaaacgtcgcggggcgcgtccactgggcaagagtcatcgccgctggcggcggcgtttcatccagccggatgaagtccaacaggtgcttacgggtagaggcgatcgtctcgcgtactgcgtccgccagcgaggcgtcttccggctggggagcagctcgccagataatatcgtcagcaatcggtgcggaacggtaggccatagcgcagtttaatgatgttaatctaaatgataatgattgctaatcctatcgatagcgataaacgatggcaagcggtttatggttaacgctgttggcgtagcacgattacgccaacaggattcatagggcgcgcatgtcgtcgctgaccagaatgtggttacgtccaagatgcttggcttcgtagagcgctttatccgctttttcgatagcgtctccgatattgcgatccgtcaggggcgcaatgccgatactgacagtgacattggtggcgacgctttcgttaaacatatgcgggattttaagatcgtatacttcctgtcggatacgttctgcggtagcgcgggcttgctgtggttcggcggtggtcagcaacaccagaaattcttccccgccaaaacggcagacgacatcgcgcgatcgcacggcgtcccgaattgccgctgagacgcgaattaacgcctgatcgcccatcatatgaccgtagtgatcgttatacgctttgaaatgatcgatatccaatagcaggacgtagtgttcatggctgcccggcgcctgtaacgtatccagccgattttgcaggccacggcggttatataagccggttaatggatcaagcatactcaggccattgagggtttcccgctcggccagcagcttaaacatgagctgttgggcaaaattatcgtagcgtttctggataacatgttgaatagcgattcccaccattggcagggccagcaaatagagaattcgcaaaccttgttcattaccgttcagccacaggcagaccgcgactggcggtagcgaatagagcgtaaacgcgacgatattcgcggcaaaggctatcgagccgataaacagaacgctaagcagggaaatcagtaaaaaagagaaatcataatggcctaacgccggatactttagcgcaatatgcgccgcccatattcccccaaagagtagggagataaaggggagattaattcttttttgtccatatttcccatgccatatcaacagtaatacgctcaggaccactatcccgatcattggcgtgcaaaatacattgatctgataaagggggaaaacgagagtaaatagcgccgacacggcgttgagaaacaagaaaagacgtaaagaaaactgatacttcttaatacgaagcgaccgccaggatggtgttgtcatgggtaattgtcgttatttatcggtgatatacacggaatcgggcgccaacatgaaaataacgtatgagaaaaggtcgcctaaagcgaggtgttgttgtttttacgttaacagtcggacaatttatcaccttactgaatacgtgtcatcaaccgttaagtaaaactcatctctttagctttctccctggctgacaaatgagaaaatatatcatatgatattggttatcattatcaattccagaggtgaaaccatgttgcagcggacgttaggcagcggatggggcgtattattgcctggagtgattatcgttggactggcgtttatcggcctgtcagctgatgcgctgaagctgttgattgtatcaggattgctactgtctgcgctgatgttgtatcacaaacaattacggcattttgtactgctgccatcgtgtatagcgcttattggcggcatgatgttggcaatgatgaactggaatcagggatgaaaatgaagagacaaaggaaggataagataattggtgcgaggggggggacttgaacccccacgtccgtaaggacactaacacctgaagctagcgcgtctaccaattccgccaccttcgcacagttatcttactttttgatatcgcctcgttggtgcgagggggggacttgaacccccacgtccgtaagaacactaacacctgaagctagcgcgtctaccaattccgccaccttcgcccagtgcgagcaatatcaacgtggttttggtgcgagggggggacttgaacccccacgtccgtaaggacactaacacctgaagctagcgcgtctaccaattccgccaccttcgcataccatcgattcttgaaaagaatcactaccacggaggcgcattctagtggttttcagctattcgtcaatagttaattgcatgggatagattgattgctgcaaaaatggacgcgagacgtaggttggataagacgctttgcgtcgccatccggcacatgcaaccagatggcgctgcgcttatcaggccaactatttcttcgcctgacgggtcatcacggtacgataaaccttaaagcgcccggtttgcgcgatgacttcatggaagccaaaagtctcatccagaatcttaggatagggcagaaaggcgttcgccacgatgcgtaactctccgccgctgttcagatggcgcactgcgccgcgaatgagcgtttgcgccgcatcgaggctggtttgcattccgtcgtggaacggcgggttggagatgatcatgtcaaaacgtcctttgacttccgaaaagacgttgctggcgaatacctcgccttcaagaccattagcggcaagcgtggcgcggctggcttccaccgccggagcgctgacatcacacagcgtcaggcgcactttcggcgaatggctggccagcgcggcggaaagcacgccagcgccgcagccgacatccagcactttacctttggtgtgcggcgtcagcgtagacagcagcagttggctaccaacatccagtccgtcgcggctgaatacgcccggcaacgttttgatggtcagcccgtcgatgttgtactcggcccaccaggattcaagactaaactgcggctgcttttccagacggccatggtaaaggccgcaacgtcgcgcgctatctactttgttcagcggcgcatagtccgccagcatcggttcggcgctacgcacgccgctgcggttttctcccacgacgaaaacatcgacgcccgacggcatcagcgacaaaatattcatcaactggaactgcgcttcgggtttatttttcggccagtagtagatcagcgtatcgcagtcagcgacatcgctggcttgcgcgaccaggctaaaacggacgttatcgcccatctggcggcttaatacctgccagtggtgaaactgttgcgtatgcgcgcggctggcggcgcattcaaagcgcgcgggcaggtcatcctgcaaatctccggcaaaaagaatacggctttgttcgaaatcatcactgtggcgcagcaagacttcacttgccggggtaaaagcagacatggaatgctccttaattcagactggcggcgattatagtagtttgatggcgcagattcgacagatttgctatatttgcgcccctgattacaggagcgtttcgctatgacatcccgacgagactggcagttacagcaactgggtattacgcagtgggcgctgcgacgtcctggcgcgctacagggcgagattgcgatttcccttcccgcgcacgttcgtctgatcgtggttgcagaggaattacctgcgctgaacgagccgctaatgcgcgatatcttacgcgcgttgaccgtgagtcccgatcaggttttaccgctgacgcctgagcgcgtcgccatgctgccgcagggcagccgttgtaatagctggcggttaggaactgacgcgccgctccaactcgaaggcgctcaggtcacgacgccggcgtttaatgaactccgggcaaacccggcggcacgcgccgcactatggcaacaaatctgcgaacatgaacacgatttctatcctcagcacgaccgatctccccgcagcctggcagattgagcaacgcgctcatgcgtttccgtggagcgaaaaaacgtttttcggcaaccagggcgaacggtatctcaaccttaagctgaccgctgatgacagaatggccgcgtttgccattacacaggtggtgctggacgaagcgacgctgttcaatatcgccgtcgatccggattttcagcgtcgggggctggggcgtatgctgcttgagcatctgattgatgaactggaaacgcgcggtgttgtaacgctatggctggaggtacgcgcctctaacgctgccgccatcgcgctgtatgaaagtctggggtttaacgaggcgacgattcgccgcaattactatcccacggcacaagggcatgaggacgccatcatcatggcgttaccgataagcatgtaataaaagaggcaaggtgtaatgatgaagtgggactggattttctttgatgccgatgaaacgctgtttacgtttgattctttcaccggcttacagcggatgttccttgactatagcgtcacctttaccgctgaggatttccaggattaccaggccgtgaataagccgctatgggtggattatcagaacggcgcgattacctcattacaattgcagcacgcgcgctttcaaagttgggctgaacggctaaacgttgcgccggggctgctgaatgacgcttttattagtgcgatggcggagatctgttctcctttgccgggcgccgtttcgctacttaatgcgattcgcgggcaggctaaaatcggtattattactaatggttttaccgcgctacaacaaactcgtctggagcgcaccgggctgcgcgagtatttcgatctgctggtgatttccgagcaggttggcgtcgcgaagcccgatccgaaaatctttaactacgccctggagcaggcagggaatcctgaccgctcgcgcgtattaatggttggcgataccgcggaatccgatattcttggcggcattaacgccggactgtcgacctgctggcttaacgcgcatcatcgcgagcagcccgcgggtatccatccaacctggactgtggcgtcattaagcgaactggagcagctcctgtgtaaacactgattgcctcccccaggttgatgggtaaaatagccgcatttttcgtattcaacatgcgtggtcaaacgccgcgcttactcaagaagatttgactatgacgttgtctccttatttgcaagaggtggccaaacgccgcacttttgccattatttctcacccggacgccggtaaaaccaccattaccgaaaaagtgttgctgttcggacaggcgattcagaccgccggtacggtaaaaggccgtggctccagccaacatgcaaaatctgactggatggagatggaaaaacagcgtggtatctctatcactacctcggtgatgcagttcccgtatcacgactgtctggtgaatctgctggacaccccggggcacgaagacttctccgaagatacctaccgtaccctgacggcggtggactgttgcctgatggtgatcgacgccgcaaaaggcgttgaagacaggacccgtaagctgatggaagttacccgtctgcgtgatacgccgatcctgacctttatgaacaaactcgaccgtgacatccgcgacccgatggagctgctggatgaagtcgagaacgagctgaaaatcggctgcgcgccgatcacctggccgattggctgcggcaagctgtttaagggcgtttatcacctttataaagatgaaacttatctgtatcagaccggtaagggccacaccattcaggaagtgcgcatcgttaaagggctgaataacccggatctggacgccgccgtcggtgaagacctggcgcaacagctgcgcgacgagctggaactggtgcagggcgcgtctaacgagtttgatgaagagctattcctggcaggggaaattaccccggtatttttcggtaccgcgctgggtaactttggcgttgaccatatgctggatggtttagtggcgtgggcgcccgcgccgatgccgcgtcaaaccgatacccgcacagtggaagcctcggaagagaaattcaccggttttgtctttaaaattcaggccaatatggacccgaaacaccgcgaccgcgtggcgtttatgcgcgtggtttccggtaagtatgagaagggcatgaagctacgccaggtccgtaccggcaaagatgtggtgatttccgacgcgttaacttttatggcgggcgaccgttcgcacgttgaagaagcgtacccgggcgatattttgggtctgcataaccacggcaccattcagatcggcgataccttcactcagggcgagatgatgaagtttaccggtatcccgaactttgcgccggaactgttccgtcgtattcgcctgaaagatccgctcaagcagaagcagctactgaaagggctggtgcagctttctgaagagggggcggtgcaggtattccgtcccatctccaacaacgatctgattgttggcgccgtgggcgttttgcagtttgacgttgttgtcgcgcgcctgaaaagcgaatacaacgttgaggcgatttatgaatccgtcaacgtggcgacggcgcgctgggtggaaagcgccgatgcgaagaaattcgaagagtttaagcgtaagaatgaaacgcagctggcgctggatggcggcgacaaccttacctatatcgcccccacgatggttaacctgaacctgacccaggaacgttaccctgacgttcagttccgtaaaacgcgcgaacactgatccctttccgggcgcggcatccgccgcgccttcgtactttccctgcctttttaaccgcttacggaatgttcttaaatcccgcgttttttctccgatccgcctgttttttatacgcaccgacaagcgattttaaaattgtgatctatatttaacaaagtgatgacataaatgtcggctttaatgcctgttcaatgcgtgaatatgagagcttaaagctgagatttgtttcagtcacgatattaataactgaaacggaagggtggcaggcgacgcgtcgttacaaattcacgaatgtgatgccagtcattgacttcagaaaccggtgagtttcaccgcattcagcaatgcaacctcgtgttgcctgagctcaaattacgagcaaactatacaggacaaaatcgatgactatgacaagactgaagatttctaaaactctgctggccgtaatgttgacctctgctgttgcgacaggttctgcctttgcagaaaacgcaacaacggacaaggcgcaaagcggaaccgaaaccgcagggcaaaaagtcgatagctctatgaataaagtcggtaacttcatggatgacagcgccatcactgcgaaagtaaaagctgcgctggtagaccatgacaatattaaaagcaccgatatttctgtcgaaaccaatcagaaagttgtcaccctgagcggctttgtagaaagccaggcgcaggctgaagccgccgtgaaagtggcgaaaggcgtagaaggcgtgacctccgttagcgacaaacttcacgttcgcgacaataaagaaggttccgtgaaaggttatgccggcgatacggccacgaccagtgaagtcaaagccaagttgctggcggacgatctcgtcccttcccgtaaagtgaaagtggaaacgaccgatggcgtcgtacagctctccggtaccgttgaaactcaggaacaaagcgaccgcgctgaaagcatcgcgaaagccgttgatggcgtaaaaagtgttaaaaacgatctgaaagttcagtaattcgtcgtaattcgtcctcccgacgtttgtcgggaggcgtaatgtgcaccacactaaaaatatcgcgaatgagtagcctgagcgctcatatttagcggtcgacattaactatggtaaaggagaggcttatgtttcgttggggcattatatttctggttatcgcgttaattgccgccgcattgggttttggtggactggctggtacggctgccggcgcggcgaaaatcgtcttcgtcgtcgggatcgtgctcttcctggtcagcctgttcatgggccgtaaacgaccctagcaggcatctgtaaagatatattgctatcaagccagtccagcggactggcttttacggttttagccgttaacgttttgcgttaccttgtcagcctggaaaaaaatgaaaaacaggaaggcagaggtgggccagcgaataccggttacgctcggcaatattgcgccgttatcattaacaccgttccggccaggccgtatggcgctggtctgtgagggcggggggcagcggggcatctttaccgcaggcgtgctggatgagtttatgcatgcgcagtttaatcctttccatctctacttcggcacatcagccggtgcgcaaaatctctcggcgtatctctgcaaccagcccggctacgggcgcaaagtcattatgcgctataccaccaggcgcgaattttttgatccgctgcgatttgtacgcggaggaaaccttattgacctcgactggctggtggaatccaccgccgcccggatgccgctgcagatggataccgcagcgcgcctgttcgacagcggaaaatccttttatatgtgcgcctgccggggggatgattacacgccgggctatttctcgccgacaaaacaaaactggcttgatatcattcgcgcctccagcgccataccgggtttctaccgtaccggcgttacgttagagggcatcaactatctggacggtggcattagcgacgccattccggttcaggaggcggcaaagcggggggcgaaaaccattgtggtgatccgcaccgtaccctcgcaaatgtattacacgccgcagtggtttaagcgtatggagcgctggctgggagagagcagtctacagccgttggtcaacctggtgcagcatcatgaaacgtcctacagcgcgatccaacaatttattgaaaagccgccgggtaagctgcggatcattgaaatttatccgccgaaaccgctgcacagcatggcgctgggcagccgtatcccggcgctgcgtgaggattacaaaaccgggcgattatgcgggcgttatttccttgccaccgttggtaaattgctcgccgcaacgccgcctctcttgcgccatacgtcgcggattgccgtgccggaaacggtggtcgtgcctccggcgccggtggccaatgatacgcatgtggcggaggtcattagcgcgccgcaggcaaacgacaccacatttaccgacgaggatctggcgtgagctggcgctttatcgatacacactgccattttgatttcccgccctttacgggcgatgagcgcgccagtattcagcgtgcctgtgaggcgggcgttgaaaaaatcatcgtgccggcgaccgaggcggcgcactttccccgcgtgctggcgctggcggcgcgtttcccgtcgctttatgctgcgctgggattgcaccccattgtgattgagcgtcatgccgatgacgattctgataagctgcaacaagcgctggcgcagcaacagaacgtcgtggcggtaggcgagatcgggctcgatctttatcgcgacgacccgcagttcgccaggcaagagcgatttttagacgcgcaactgcaactggcaaaacgctacgatctgccggtgatcctgcactcgcggcgcacgcatgacaaactggcgatgcacttaaagcgccaggatctgccgcgaaccggtgtggtgcatggttttgccggcagtctgcagcaggccgaacgctttgtgcgactgggctataaaatcggcgtcggcggcaccatcacctatccgcgcgccagtaaaacccgtgatgttatggcgcgcttgccgctggacgcgctgttgctggagaccgatgcgccggatatgccgctaaaggggtttcaggggcagccgaaccgcccggagcaggcggcgcgcgtatttgatgcgctctgcgaattacgtccggagcccgcagaggtgatagccgatacgctgtatcgcaataccattaccttgtttcggctctgatggcatcgcagccgccgtccggcaggcgacgcttacaaatatagcgccggcaaaatcagcttcgccaccccacgcgcgcgcaatccgtcagccagccgttccacctcttgcggcgtcgcgcctggccaggctttcgcttcgccatagacaccgtgcgcatgaaaggcattcaaacgcaccggaacctcgcccagcgaagtaataaacgccgccagtgaatcgatatgcgccgcatagtccacctgacccgggataaccagcaaccgcagctccgccagttttccccgcgcagcaagaaagcggatactgtgcttaatatgcgtgttatcacgtccggtcagacggtgatgacactcgctcttccaggctttcagatcgagcattacgccgtcgcaaaccggcagtagtttttgccagccggtctcgcttaactgaccattactgtccaccagacaggtcagccgttgtaactgcggatcggctttgatcgccgtaaatagcgccacaataaacggtaattgcgtggtcgcctctccgccgctgacggtaataccttcaataaacagcgatgctttacgaatatgacgcagcacatcgtcaacgctcatggtctgcgccattggcgttgcctgctgtgggcacattttcaggcaggtatcgcactgctcgcagacgtccgaccgccataccactttcccgccatcaatgctgagggcgtggtgcggacactgcgatacgcattccccgcagtcgttacagcgtcccatcgtccacgggttatggcaattcttgcagcgcaaattgcagccctgtaagaataatgccaggcggctgcctggcccatcgacgcaggaaaacgcaatgatcttactgactaaagcgcatctgttgttcatggctgactacgcgtggctgtcgttccaggatgcgggtattacgtgcggcttcttctcccagccaggtggtattcgtgcgcgagccttcggcgcgaaatttcgccagatccgacaggcgcaccatataaccggtgacgcgcaccagatcgttgccgctgacattggcagtaaattcccgcatcccggctttgaacgcgccaagacaaagctgaaccagcgcctgcggattacgcttgatggtttcgtccagcgtcagaatgtcgctgatcccggcatggtaaaaggcatggtgcggcgcgacggtttgcaaatgggtgatagggtccggttcatcgccatacggcagacgcgcgcccggcgtagtgccaatatcggaactgatgccagactgggcatggagcagcgcccgttgcttccagccatacttcactggcgtattttcgacgaaatccgccagttgggcgctgatacggtagcccagctcgttcgccgtatcattcttgccgtaacgggcggtcaggcccgcgttttcgcacagcagattcacggcttccgccagcccgtacataccgaacatcggcgcaaaacgttcgggctcgatcaaaccttcctgtacaagaaagctattctcaaagaaatgtgatttttcatagaggaattcacatcgtgaattaatgatggcgatctgctgtcggcagtagtgcggtagcgtacgtgaaaagaagtcatcgacagacgtactgcgttctgccacggctttcaggttgagacgtaccagcgtactgccgccgccgccaagcggtagcgagttataacaactgacgatgccataatggccttttgtgaaaattttatcatttacagggccattggaaatgtgtggcttactgcattcacaaatgtttttggcgacctccagcagcagatcgtccggcgtaatttccgcatcgtagataaacgtcaggttaggcgccacctgctttagctcggcatcggcgcgcaaaatcgctcgtgtgacaggcgtatcggcagggccaatattggcatgcataaaggcgtctggcagcgttctgtcgagataacgccagaaacgttttattcgaatatcgatcgcatcttgtgttagaattctaacatacggttgcagcaacgcatcaagctggccgagataaaccggcatggacgtcacggaaggaacgtgatgatacagaatggtgagtagggataacgcatcatccagatctttcgcgccttccagttccagccactgtgaaccgttagccagaaatcgggcgtaatcgggcaacacgtagcgcggtttgaagggggcgtgcccctcaaacatatcgcaaatgacgccttcatccagcgcctggcgggcatcttccggcagggtgggataaggcagggcgttttcagcttccagcgccagaaaatggcgtttttgttcaggcgtgagcaccgggctggtcacaatttgctggcaacgctgctggagcgcagtttcgcatgaggcaggcatcttcgtttcctctttatgccgggacgatgcgctattgtagaaaatggcggcaaaccgactttgatcctgatgcgcttatcgctcgaagaacagacggtgacggcgggataatttgattcagatctcattacagtaatgcaaatttgtacgtagttttcattaactgtgatgtatatcgaagtgtaatcgcgagtgaatgttagaatattaacagactcgcaaggtgaaattttatacggcaatgccgttggagaatgtcatgactgatttaaaagcaagcagcctgcgtgcgctcaaactgatggatctgaccactctgaacgatgacgacaccaatgaaaaagtgatcgcgttgtgtcatcaggcaaaaactccggtcgggaatacggcggcgatttgtatttacccgcgttttatcccgattgcgcgtaaaactctgaaagaacaaggtacgccggacatccgcattgcaacggtgactaacttcccgcatggcaatgatgacatcgatattgcgctggcggaaacccgtgcggcgatcgcctacggcgctgacgaagtggacgtggtattcccgtaccgcgcgttgatcgccggtaacgagcaggtgggttttgacctggtaaaagcctgtaaagacgcttgtgccgcagcgaacgtattgctgaaagtgattatcgaaaccggcgagctgaaagaagaggcgctgattcgtaaagcctctgaaatctccattaaagccggtgcggatttcatcaaaacctctaccggtaaagtgccggtaaacgctacgccggaaagcgcgcgcatcatgatggaagtgatccgcgacatgggcgtttccaaaaccgttggcttcaaaccggcgggcggcgtacgtacggcggaagacgcgcagaaattcctcgcgattgcagacgaactgtttggcgctgactgggcagattctcgtcactaccgctttggcgcatccagcctgctggcaagcctgctgaaagcgctgggtcacggcgacggtaagagcgccagcagctactaagctctgatttgccggatggcgctgcgcttatccggcctacaaatccaggcctgtaggccggataaggcgttagccgccatccggcgatgtaagccttctactcttttccctcaggagggtaccgtgtttctcgcacaagaaattattcgtaaaaagcgtgatggtcatgcgttgagtgacgaagaaattcgtttctttattaatggtattcgtgacaatactatctctgaagggcagattgccgccctggcgatgaccatcttcttccacgatatgaccatgccggagcgtgtttcgctgaccatggcgatgcgggattccggtactgtccttgactggaaaagcctgaatctcaatggcccgattgtcgataagcattcgaccggcggcgtaggggacgtgacgtctctgatgttggggccaatggtagcggcctgcggcggttatgtgccgatgatctccggtcgcggcctcggacataccggcggtacgctcgacaaactggaagcgatcccgggcttcgatatcttcccggacgacaaccgtttccgcgaaattattcaagacgtgggtgtggcgattattgggcaaaccagctcgcttgcaccggcggacaaacgtttttacgccacccgcgatattaccgcgacggtggactctattccgctgatcaccggctccatcctcgccaagaaactggccgaagggcttgatgcgctggtaatggacgtaaaagtcggcagcggcgcgtttatgccaacctatgaactttctgaagcccttgctgaagcgattgtcggcgtggcaaatggcgcgggagttcgcactacggcgttgttaaccgatatgaaccaggtgctggcttcaagcgccggtaacgcggtggaagtgcgtgaagccgtgcagttcctgaccggtgaataccgcaatccgcgcttgtttgacgtcactatggcgctatgcgtggagatgctgatctccggccagctggcgaaagacgacgccgaagcgcgtgccaaactgcaggcggtgctggataacggtaaagcggcagaagtctttggtcgtatggtggccgcgcagaaagggccaagcgatttcgttgagaactacgataaatacttgccgaccgccatgttgagcaaagcggtatatgctgataccgaagggtttatcagcgcaatggatacgcgtgcgctggggatggcggtcgtctcgatgggcggcggccgtcgtcaggcgtctgacaccattgattacagcgttggctttaccgacatggcccgtctgggcgacagcatcgacgggcagcgcccgctggcggtgattcatgccaaagacgaagccagttggcaggaagcggcgaaggccgtcaaagcggcaattatccttgacgataaagcgccagcaagcacaccttcggtctatcgtcgaattactgaatagttgtatactgatctgatcaattatttttgaagcactaagtacggagaagatatgaaacgtgcatttattatggtgctggactcattcggcatcggcgctactgaagacgcggatcgttttggcgacgtaggttccgacactctgggccacatcgcagaagcttgcgccaaaggcgaagctgacaatggccgtaaaggcccgttgaatctgcctaacctgactcgtctggggctggtgaaagcgcatgaaggctctaccggtaaaattgccgccggcatggacggcaacgcggacgttattggcgcatacgcatgggcgcacgaactgtcctccggcaaagatacgccgtccggccactgggaaatcgccggcgtgccggtgctgttcgactggggctatttcagcgatcacgaaaacagcttcccgcaggaactgctggataagctggtgaaacgcgctaacctgccgggctacctcggtaactgccactcttccggtacggtcattctggaccagctcggcgaagagcacatgaaaaccggcaagccgattttctacacctccgctgactccgtgttccagattgcctgccacgaagagacctttggcctggataaactctacgagctgtgcgaaatcgcccgtgaagagctgaccgaaggcggctacaacattggccgcgtgatcgcgcgtccgtttatcggcgacaaggccggtaacttccagcgtaccggtaaccgtcacgacctggccgtagaaccgccagcgccgactgtgctgcagaaactggtcgatgaaaaacagggccacgtggtgtccgtcggtaagattgccgacatctacgccaactgcggcatcactaagaaagtgaaagcgaccggtctggacgcgctgttcgacgcgaccctcaaagagatgaaagaagcgggcgataaaaccatcgtcttcactaacttcgtcgacttcgactcttcctggggccaccgtcgcgacatcgcgggctacgccgcaggcctggagctgtttgaccgccgtctgccggagctgatggagctggtgggggaagatgacattctgatcctgaccgctgaccacggctgtgacccgagctggaccggtactgaccatacccgtgagcacattccggtgctgatctacggtccgaaagtcaaaccgggctctttaggtcaccgtgaaaccttcgcggatatcggccagacgctggcgacctactttggtacatcgccgatggactacggtaaaaacatgctgtgatacctgttgtctttcgcgctgtagatgcgttgacttcattcgctcaccccggtcacatagttaatctatgctcccggggattcacgaattcgtcgccttcctacaacgcgaaatacttagggtatttcactgttttgacacacgttttgtaggcctgataaggcgtagccgccatcaggcaataacaacaaatttaaagggaactgaagatggcaactccacatattaatgcagaaatgggtgatttcgctgacgtcgtattgatgccgggcgacccgctgcgcgcgaagcacattgctgagactttcctcgaaaatgttcgcgaagtgaacaacgttcgcggcatgttaggtttcaccgggacttacaaaggccgtaagatctccgtgatgggccacggtatgggtatcccgtcctgctccatctacaccaaagagctgatcaccgatttcggcgtgaagaaaatcattcgcgtcggctcctgcggcgctgtgcgcatggacgtcaaactgcgcgacgtggtgatcggtatgggtgcctgcaccgactccaaagtgaaccgtatccgttttaaagatcatgacttcgcggctatcgctgacttcgacatggtgcgtaacgcagttgatgcggcaaaagcgctgggcgttgacgcgcgcgtaggcaacctgttctccgctgacctgttctactctccggacggcgaaatgttcgacgtgatggaaaaatacggcgtactgggcgtagagatggaagcggcgggtatctacggcgttgcggctgaatttggcgcgaaagcgctgaccatctgcaccgtatctgaccatatccgtacccacgagcagaccactgccgctgaacgtcagacgaccttcaacgacatgatcaaaatcgcactggaatccgtactgctgggcgataaagagtaagattgtgaagggggccagagcaggcccccttcatcgtttatttcgtcagcacttcccactgtaaattgctttctagcatgaccgtatcggtagcatgcgtaaattgattatcgttcaagacaggtgttaatgtcagcgtgacgttcatcattttcccactgacctgctggttattatccatcgcgatgataccgttgttattatgtagcaacagactatccagggcactgtcattgggagcaaagctcactctatcaagggtgctggcaataggataacttttaccatctactatcatctgactaacacgtacggcgagaccaccgttatttccaaaataaaatcgtcccttttcccccgctgaggcctgcacaaaaagagcaatattctggctttctgggcaactcacactaacgtgaacctcctgtgaagacatttgattccagccttgctgagaattgacgatatcatcttgcttaagccagccaaagctgacgtttggcgaagaaaacgttatttggcagtcatcgtcggcccgggctgatggggggagtagtgcggtgaagatacaacatatagcaatccccaaccatttgctgttggatttcattgacagactccctttgccgtttcataaaatgcctctttatcctgggttttctgcagcgtgtagtggatgcgacacagacgattcatatcatcatcagcggcatataacgcaggattatccccaacatcggtgataaatacgcgtccgctgtcgacagcgctgaccaaatagttatttttttcatctacaatgctggtgcctttaggtagccatgagccatccggacgctttactgccagcatcacacggcgtgtattcagcacgttgaaatccagtacccgaaaagcgctgtgcgcgacggtaatattcttaataccgtttgccagttccatactctttggtagcgtattcgcattaacctctacgcgggatttccgccattcagttagccccggaatgacggcttgcccccagtggtcagtccagattcgcccctgtggcgtggcgatttcaatgccgctttctggttcactcaggcgtgcgatagcaaaggtatttttgattgtataaggcgagaacgttatgccatgttcgtgtgcagcgatgcctccgctgaaggttgcgttatagttgcggtaattatcgccatcagtgccgccgcccacgctgagttgagtgtaatgaagattgctattgagattaccgttgaagctattttgctggttttttgcatcacgatccgcagaaatatagtaatgggtatctttactcagcgaaccattattttgtagcccgtaggttgttttatcaccttgattacgcatataagcgccgacgcgctgctcacctagtggaatgctgatgttgatgtaaaacatatcatcatcattactgtcgttatgattctcatcatcctgattaacagcgtgctgccagttagcggtaattgaggcatatttaaacgttttgccccaggaagccattatactgcgagagtcgttgtcattatccgtagcctgataagtgtaataacccagagagaaggtacctaacagattatggttccaggcaatattagcactggagctactttgatattcgtaagcatctttattgagcgcatccgttaactcacgatatccgtcgctgtagcgggcggtactgacgtcaagtctaatttccccgggcagcgccatgctggcgcgtagttcacttttcgcaccctgcagagattcgccaaaggacgctttactgcccagcattgagccggaaaacgtccatttattggttggaagccattgcagcatccctcctgccgcttgatagtcttgtgccagtacgccagacgcctgcgccagccagttttcactcagtttccaaccatcgctgatgttatagatccaggggagcgaatagtcgctggtggtatcacgtatgcgccctatggacattgttaagcctgcgggcgtgagttcgcgtaaattaaaggatactgccggcaccgtgaaggttgtcgttgagccatcggtttcaacgacgctgacgttaaggtcggtattgctgcgtatgatggggacattttcaagggtaaatgccccagcgttcactggtgcggtataaataatctgtccggactgacgaacttcaacgcgagcctggtgggttcgggcaataccgttaatggttacgccttgtgtatcctgtgccagcccttgttcagggataagctgtacgccgttgatcggcgcgccactgaatagactggagttgacgttgatctgcccaacttgcgcacgcattttttgtgcctgaaatacgtgctccgcataggtatatagactatcggtacggtattctccatcattattcgtcagcatgtagcggctgcgcagcgtccattccgcgaagtttaagccagcttcaaggtttgcctgggcatagtttcggctatcgctaccggatgactcgctgcgactggcgtacaggttatagttaaataacccggcggtgccgcctttaatcacgttgtttagcgatagtaagttattatccagagcctgtgccggaacaaaaagctccagcgattcactgtttggcagtggggtaataatcgctgagggataatcttcttgtaggctatggcaggtttctttggcgctgatattaagcgaaacgagcccgctggcgctgaggaaatcgtcatccacgcaaagctggccttctgtgtcgaaacgcgcgaccaacgaccctctatttacgccattgatctttaccatgacggtgtggctgcctggtagaaagcgcggcgcgcgggaaaaatattgtgcgacgttggggctaatgcctctggaggtgagaatacccatgtcaaaattcagctcctccgccagagctgaaaacgtcgtggttgccagtgagcaataaagcgcagttttgatgtatagcggcagttttaaatacttcacgtgctagctctcattacggcaccagcggtgaggtaaagctggggacttcaatgccgtaacggctggcaggataaaaacgtacggatgtatcagcagcaaagggcgtttttatactgacgttcaatgtttcgccgggcagaatataggtttttttaatcgtgccttcgcccccggaaggtaagaaggtaatattttgggctaaacgtacaacgtagggagacggatttttgacgttgattgtttgtccgtttctggaccaggttaataatttccaggcatcagtaacgaccggtagatttttaggacgaattaataccggcaaatcctggcgtagattaaaacctattttcattcctttatcggtagatttcggaggaataccttcaaacgtgacgcgcttatagtgctcgacggtgagcggttccgtactttccataataaagcgtagttgctgctgctggcctgcttcaacgcgaacaactggttgagtgacatccagtttcacaccattgtcgtcaggtaaatcaacgacggtggtatataacaaagccggattgctgtcggtgtttttaacattcattacgccgctgtgtgtggattcttcaatcaccagtagcgtagtttccggtaccatgccggcagcgttagcctgtgaaaagagtgttgaaaaaacaaaggggacgctgagtaataataatggaagtttagtcactgctggcatcagaattagtcctttaattttaatctgtctccccataataagggagacagatcaataacctttttacacggtctggatcagagatatttaagcgtgatggttgcctgaccatccagatcagtatcatcagtaatggccagcgttgcagtattctgaatagccagtgaggttttcagcgggaaaatggcgagggtatacggaaccggttcggtggtgccttttgtagcaacggtaaacatttccatattgccgtttttgataatcccggtggaagacttctgccagactgggctatcaacggttcctgagatagcgtcagattttacaccatcagcggtaacgttcgcggtatcggtataaatagagaacgcgccgatttttacaccttcggttgttttgccaacgccgtaggacattgtggtatcagatactatactattagtcatatcgccattggctatggagataacggatgcgcctgggtgggtgtccgcacggtcatcggtaatagtccatgctgctttggttgcagacggacaagagatactcagagagacatctttagtacccagttggtttacatcggttgcggaaagtgtggcgaggcggatagtaccgtaatcaaccacgccgccgccgctgagttctggggtacaaccaccaacaaccagttgaccggtgacttttaatacggcagtagtgtcagcattcacgctggttgtagcaaaggaagctgcaattgcagtaataagcaaaatttttttcattatagttccattaaagaggtgttgaatattccatgtgaatgctggagttacagatatacgagtgtaaaggtcgcctgaccatcaagcgtggtgttatcggtaatagccagtgtgtccgttccctgtatagcggcagctacgcgtataggaaatgttgcggtggtaaaagcaacggggccatttccatcgccgacactatatgtagtgcgggttggaaatgtatttgtaagcgcaacgtattcgtttgatgctaaagcccagacaccaggattcgaatcatttgacgctaccatcttcgtcttaactccatcggcggtcgaattattcgcgtctatggagaggccgtatgcaccaatcttgataccatctgctgttgtacccaggcctagctgatagtttggtattctattgttctgaccgccaaatgttgcgttatcgatagtcagcgttgtcgccgaatcgccatgattgtcggtagcgacccagccaacttttgccggtgcaaggcactgaatcgtgagtgttatatctttgtatcccagttgattcgtctgagttggcagcagatcgctaacggccttagtaccgaaatctacaacgccaccatcacttaactctggtatacatgcgccgttggttaaaacgccagtcagttttaatacagcagtggattcaaccgcttgcgctgaagttgataatcctattatgacagaggtcgctattaataattttttcatcagtaatccctaacgattaagtatatttccaaatgacatgtaatgcgcgggtcgggattctatgaagataatgatatgttgtaaatttaataaaattaaatcttggttaagaaaaactttaatcatcattggtgatgataaatggtttataattcgctgggtttatgaagtgcggggaaataatattaattttaaagaatatagtagttagtgagtgtgttttaactatttgtgctattcactcatttttcagaatatgttgttatgtttaaataatatcagagacacattcgtctctctgatattattcatttagcgcacagcttctgcaatccacgccgacagttcccgcagttctttttcctgctccgggaaatcaaccagtagcgcctcgcacgtttcctgtagtttatccgcgcggtacaaacacccttgcagccgctcggccagcgcttccagcggtgccgggttcaggctatcggtaaatgcctgtgcgcgggtaatcacacctttctcgacgtcaaaatgcagctcgacgccgccccaggtgaaacgctcgtccagcagatggctgaacgctggtgcctggccgaaattccactcccaactgctctggcgcgcaaaggtttcggcaaaattcggcagatccggcgttttatccggtgaaatcacttccgcgtcgacgcgttcgccgtaatgggcgaaaaaggcttccgtgaccgcctggcagacctgttcatgggtgatacccggtaatagctcggtaagattggccacgcgggagcgaacggaggtgattcctttcgccgcaagtttctttttatcgggattcagatagtttgccagacggctgaggtctgcattcagcagcagcgtaccgtgatggaagccgcgatctttggtttcgcgataggctgaaccggagactttgcgatcgccgtccggcgtttttacgaccagatcgttgcgtcccgaagcatcggccatgacccccagcgaattcagcgccgcgagcacaatatgggtggagatggttttatcgtattccggtttaccagccataaaggtaaagcaggtattaccgaggtcatggaataccgcgccgccgccgctgctacggcgggccagacggacattatcttcttccatacgccgcgtattacactctttccacgggttttgcgcgcgtccaatgaccaccgtatccgcgttgcgccacaggaacagcacgcgctgggtggcgggcatctggcggaaaatgcactcctcgaccgccaggttaaaccagggatcgtaagagtcagaaataagcaggcgtaatgttgtcatagtggttttccttacctttattaagccgtcattttactctttttcctcacgctcttcctcttccggaacaggcttgctggccgttagcaggaagggcgactgctgccagcgggtgcgtttaccttgtagcaaggtgcgcgtcagcaccacgcctatcgccagcgagagtagcagcatcaggcgtagaatgttggtggtgttatcgacctgctttgcttcggtggccagcgtgtgggtatccagcgttagacgcaggtagcccaatgggccgtttttcccctggataggctcgacaatttgttggttaaaatagctgcccgcttttttgccatccagcgccagcctgtcgcgcacattgacgctttcgccagcgcgagtaataagatcgccctgttcatcatagacgccggcatccagaatacggctctcttgcgtgagctgacgcagcacggcgttgatgcgattttcatccggtgtttcgctgcgcatcagcggggcgatgttgagcgtcacctggcgcgccagcgtgcgggccagctcttccagctgcgggttgcgctgtcgctggtggttttgactaaaccaggacgcgccctgcataagcgcgacgagcagtgtgagacagaacaatacaatgactgcacgatgcagccgaaatttcagttttgcgcgagccatattccacctgctgaaaatttgaggcttaatgttgccagaagcgatggttacaaggtagcctcatgcgttattttccgcggggcggttaccggcctgaacgatttacaggagctttaatgcctaacattacctggtgcgatctgcctgaagatgtctctttatggcctggtttgcctctttctttaagcggcgacgaggtgatgcctctggattaccatgcaggccgcagcggttggctgctgtatgggcgcgggctggataagcagcgtttaactcaatatcagaccaaactgggcgccgcaatggtgattgtcgccgcctggtgcgtggaggattatcaggtcattcgtctggcggggtcgctgacgccgcgtgcgacgcggctggcgcatgaggcgcagctggatgtcgcgccgctgggtaaaattccgcatctgcgcacgccggggctgctggtgatggatatggattccacggcgatccaaattgagtgtatcgatgaaatcgcgaagctggccggtaccggtgagaaggtggctgaagtgacggagcgcgcgatgcgcggcgagcttgattttaccgccagcctgcgcagccgcgtggcgacgctgaaaggcgcggatgccgatattttgcgacaggtgcgcgggaatctgccgctaatgccaggattaacgcagttggtgctaaaactggaagcgctcggctggaaaatcgctatcgcctccggcggcttcactttcttcgccgactatctgcgtgaccagctacgtctgacggcggcagtcgccaatgaactggagatcatggacggtaaatttaccggccacgttatcggcgatattgtggatgctgagtataaagccaataccttgcttcgtctggcgcaagagcatgacatcccgctggcgcagacggtggcgattggcgacggcgctaacgatctgccaatgatcaaagcggcagggttaggtattgccttccatgccaagccaaaagtaaacgaaaagacggagattacgatccgccacgctgacctgatgggcgtgttttgcattctctccggcagcatgaaccagaaatgattaacctgcccaatggcaaggcgaccgtaggccggataagcgccagcgccatccggcaacagcgttaacgaaagaggtaaaacgtggcaaaagctcccaaacgcgcctttgtttgtaatgaatgtggtgccgattacccacgctggcaggggcaatgcagcgcctgccatgcctggaacaccattaccgaggtgcgccttgccgcgtcgccgacggtggcgcgtaacgaacgtctgagcggatacgccggcagtgcgggcgtatcaaaagtgcagaaactgtctgacatcagtcttgaggaactgccgcgcttttctaccggttttaaagagtttgaccgcgtgctgggcggcggggtggtacccggcagcgccattttgattggcggtaaccccggcgcgggcaaatcaacgttgctgctgcaaacgctgtgcaagctcgccgagcagatgaaaacgctgtacgtcaccggcgaagagtcgctacagcaggtggcgatgcgtgcgcaccgtctcggcctgccgaccgctaatctgaatatgctctccgaaaccagcatcgagcagatctgcctgatagcggaagaagaacagccgaaactgatggtgatcgactctatacaggtgatgcatatggcggatatccagtcgtcgccaggcagcgtcgcccaggtccgcgaaacggcagcctacctgacgcgcttcgccaaaacgcgcggcgtggcgatcgtgatggtcggccacgtcaccaaagacgggtcgctggcggggccgaaagtgctggaacactgtatcgattgctcagtattgctcgacggcgacgctgattctcgtttccgcacgctgcgcagccacaaaaaccgctttggcgcagtcaatgagctgggcgtcttcgccatgaccgaacaggggttgcgcgaagtgagcaatccgtccgccatctttttaagccgtggcgatgaggtcacttccggcagttcagtgatggtcgtctgggaaggcacgcgaccgttgctggtggagattcaggcgctggtcgatcactcgatgatggcgaaccccagacgcgtggcggtcggtctggaacaaaaccgtctggcaatcctgctggcggtgctgcaccgacacggcggtctgcaaatgtcggatcaggacgtcttcgttaacgtggtcggcggcgtgaaagtcaccgaaaccagcgcggatctggctttactgctggcgatggtctccagcctgcgtgacaggccgttgccgcaggatctggtggtgtttggcgaagtggggctggcaggcgagattcgtccggtgccgagcgggcaggagcgtatttccgaggcggcgaaacacggctttcgtcgggcgattgtgcctgccgccaacgtaccgaaaaagccgccggaaggaatgctggtgttcggtgttaaaaagctcgcagatgcgttaagcgtgtttgacgacttataattctctgtatgtagtgatgttgtataatttgccggatggcgatgcaatgcgtcttatccggcctacggattgatacggattgatgttgtaggcctgataagcgaagcgccatcaggcagtgttatgcgatttttccagcaggaggctcttgtgtcatcgttcgactatctcaaaaccgcgattaagcagcaaggttgcactctgcaacaggtggctgacgccagcggtatgaccaagggatatctgagtcagttacttaacgccaaaatcaaaagccccagcgcgcaaaaactggaggcgctacaccgttttctcgggctggagtttccccgccgacagaaaaacattggcgtggtgttcggtaaattttatccattgcataccggacacatctacttgatccagcgcgcctgtagccaggtggatgagttgcacatcattatgggatatgacgatacgcgcgaccgcgggctgtttgaggatagcgccatgtcgcagcagcccaccgtgtcggatcgcctgcgctggttattgcaaaccttcaaataccaaaaaaatattcgcatccacgcctttaatgaagaggggatggagccttatccgcatggctgggacgtctggagcaacggcattaaagcgtttatggcagagaagggaatacagccgagctggatctacacttccgaagaggctgatgcgccgcagtatcttgagcatttagggattgagacggtgctggtcgatcctgaacgcacgtttatgaatatcagtggggcgcaaatccgcgaaaatccgtttcgttactgggaatatattcctaccgaagtgaagccgtttttcgtgcgtaccgtcgcgattctgggcggggaatcaagcggcaagtctacgctggtcaataagctcgccaatatttttaataccaccagcgcctgggaatatggccgcgactatgtcttttcgcatctgggcggcgatgagatggcgttacagtattccgactacgataaaattgcgctgggccatgcgcaatatattgatttcgcagtgaaatatgcgaataaagtggcgtttatcgataccgatttcgtcaccacccaggcattttgcaaaaaatacgaaggacgcgagcatccctttgtccaggcgctgatcgacgagtatcgcttcgacctggtgattttgctggagaataatacgccgtgggtagctgacggactgcgaagcctgggcagttcagtggatcgcaaagcgttccagaacctgctggtcgagatgctgaaagagaacaacattgagttcgttcacgttaaagaggctgattacgatggtcgctttttgcgctgtgtggaactggtgaaagagatgatgggcgagcagggataagaaccaatgcctgatgcgacgcttaccgcgtcttatcaggcctacagtttcacaacgtactggaatcgctgggtttgtaggccgggtaagcgcaagcgccacccggcattcagacatttatttggcaatacgcttgtacttgatacgcttcggctccagcgcctcggcgcccagcgtgcgtttcttgtactcttcgtattcggtaaagttgccttcgaagaattccaccttaccttcatcctgataatccagaatgtgggtggcgatacggtcaaggaaccaacggtcgtgcgagataaccatcgcgcagccagggaactccagcagggcgttttccagcgcgcgcagggtttcgatatccaggtcgttcgtcggttcgtcgagcagcaggacgttgccgcccacctgcagcagcttcgccagatgcaaacgaccgcgctcaccgccggacagttcgccaacgcgtttgccctgatcgacgcctttgaagttgaagcggcctacataggcgcggcttggcatttcagtgttgccgatcttcatgatatccagcccgccggacacttcttcccagacggttttgctgttgtccatcgcgtcgcggaactgatcgaccgaggccagcttgacggtttcacccagcgtaatggtgccgctatcgggctgctcctgaccggacatcatgcggaacagggtcgatttacccgcgccgtttggcccgatgatcccgacgatagcgcctttcggcaccgagaagctcaggtcgtcgatcagtacgcggtcgccgtaggatttacgcaggttgctgacttcaatgactttgtcgcccagacgcggtcctggtggaataaacagttcgttggtttcgttacgtttctgatactcaacgctgttcagttcttcaaagcgagccagacgcgccttacctttcgactgacggcctttcgcgccctgacgcacccactccagctctttctcaatggatttacggcgcgccgcttcggcagacgcttcctgcgccagacgctgatctttctgctccagccaggaggagtagttgccttcccacggaataccttcgccgcggtcaagttccagaatccagccggcgacgttatcgaggaagtaacggtcgtgggtaatcgccacgacggtaccttcgaagtcgtgcaggaaacgttccagccacgcaacagattcggcatccaggtggttggtgggttcgtcgagcagcagcatgtccggcttttccagcaacagacggcacagcgccacgcgacggcgctcgccgccggacagtttttcgactttggcatcccagtccggcagacgcagagcgtcagcagcgcgctcaagctgcacgttcagattatgaccgtcgtgcgcctggataatctcttcaagtcggccctgctctgcggccagcttgtcgaagtcggcatccggatcggcatacagcgcgtacacttcatccagacgtttgagggcgttaaccacttccgaaacggcctcttcaatcgactcgcgtaccgtgtgttccgggtttagctgaggttcctgcggcaggtagccaatcttaatgccgggctgcgggcgcgcttcgccctcgatatctttatcgagccccgccatgatgcgcagcagggtagacttaccggcgccgttaaggcccagcacgccgattttggcgccagggaagaagctcagcgagatgtttttcagaatatgacgtttcggcggaaccactttgccgacacgatgcatggtataaacgaattgagccacgttggacttcgcctctatgtttatcgtgatggtgaatagatgtcaaaggcgaagtgtagcctttttccctgcctaagcccagccagcagatcgcactcgcaataaaagtaaaaaagtgtccgtaacgtggcgcaaatggctatgactggttagcataaattcattacgcggcatgatgctgcattggataacaattgaggaagtgcttgtggatagagccaaaccatttgtctggcgtctcgtcgccgccagcgtatgcctgctgaccttttgtcacctcgcgcgggccgactcactggaagagcagcgtaaccgctatgcgcagattaagcaggcctgggacaaccgccagatggatgtggtagagcagatgatgccgggtctgaaagattatccgctctacccgtatctggaataccgtaagatcaccgacgatttgatgaaccaaccggcgattgctgtcacgcagtttgtgcgcgccaatcctacgcttccgcctgcgcgtacgctgcaatcacgcttcgtcaatgagctggcgcgtcgtgaagactggcgcggcttgctggcgtttagcccggagaaacccggcaccacggaagcgcaatgtaactattactacgcgaaatggagtaccgggcaaacggaagcggcctggcagggcgcgaaagacctttggctgaccggcaaaagtcagccgaatgcctgcgataaactgttcagcgtctggcgggcctccggcaagcaagacccgctggcgtatctggaacgtattcggctggcgatgaaagccggaaatacggggctggttacggtgctggccggacagatgccggcggaatatcaaacgatcgcctcagcgatcattaccctcgctaatgaccctaataacgtgttgatctttgcacgcaccaccggcgccaccgattttacccgccagatggcggaagtcgcgtttgccagcgtcgcccgccaggacgcggaaaatgcgcgtctgatgatcccctcgctggtacaggcgcagaaacttaatgaggaacaaacgcaggcgctgcgcgatatcgttgcctggcgactgatgggcaacgatgtgaccgatgcgcaggcgaaatggcgcgatgacgcgattatgcgctcgcaatcgacgtcgcttatcgagcggcgcgtgcgtatggcgctggggatgggcgatcgtcgcggtctcaatacctggcttgcccgcctgccaatggaggcgaaagagaaagacgagtggcgttactggcaggcggatttattgctggagcgcggtcgtgacgccgaagcgaaagagatccttcatgctttaatgcagaagcgcggtttttatccgatggttgcggcgcagcgtttaggcgaagagtacacgcttaaaatcgataaagcgcccgccaacgtaaacagcgcgttgacgcaggggccggagatggcgcgtgtacgggagctgatgtactggaacctggataacacggcgcgcagcgaatgggcgaatctggtaaaaagccgtagtaaatctgaacaggcgcagttggcgcgctatgcgtttaaccagcactggtgggatctgagcgtacaggcgacgatcgccggaaaactgtgggatcatctggaggagcgtttcccgctggcgtataacgatctttttacccgctatacccgcggaaaagatatctcacaaagctatgccatggcgattgcccgccaggagagcgcctggaacccgaaagtaaaatcgccggtaggggccagcggcttaatgcagattatgccgggaacggccacccatacggtgaaaatgttttcgattccggactaccgcggccccggccaactgctggagccggagaccaacatcaacattggcaccagctatttgcagtatgtctatcagcagtttggtaataaccgtattttcgcctcggcggcgtataacgccgggccggggcgcgtgcgcacctggcttggcaatagcgccgggcgtatcgatgccgtagcgtttgtcgaaagcattcccttttcggaaacgcgcggctacgtgaaaaacgttctggcctatgacgcttactatcgccactttatggggcagaaagaggccttaatgagcgactctgagtggcagcgacggtattaatgcagacgggttatgttatcatttgtactcgtgtaacagtacaaacggcggtataacatgacccagcattccccttattcatcggctatcgccgaacaacgtaatcaggagtggcttcgttttgtggagttactccgtcaggcatatgcagaggatctgcatctgcctttattacaactgatgcttacgccggacgagcgtgaagcgctgggaacgcgcgtgcgcattattgaggagttgttgcgtggcgaaatgagccagcgcgagttgaaaaccgagctgggggcgggcatcgccaccatcacgcgcgggtcaaacagcctgaaatccgcgccggttgaactgcgtcattggcttgagaacgtactgctgaaaaacgcctgatttgctcgtaggccggataaggcgaagcggccatccggcaacatcgccgcgaaatgcctgatggcgctgtgcttatcaggcttacaatatagcgcaaataattatcgatacaccgcgttatgaaacgggctgagcgccaggatcaccgcctggtagtaaacgctggagcgcgttaattttccggcggtaaatacgccaatggcgccctctttacgaccaatctcatcaatacctgtgtactgcgacattaccgggccaagcgcttctccctggcggactctgtcgagaatgacggcgggcagcggtagcgtggccgatcgcgcttcaccgcgctgaacgccgttatcaatcaccacccaactgaaggtggcgtcatcgtcaattccggcttcaatggctacccagaaatcagcttgtggatgcaggcgtcgcgcattatccacgcgatttcgtgcgccagcacgcgtttcctcgcttccgaagggctgctccggtacgccgctctcgacggcgacgggcgtaatatggcacgatccttcgccgaaaatctcttcaaatgcctgtagaattgcctgaattttggcaggattggtggtcgcagagataacctggtgcataattaagctcagttttaaaaatttatcgcagtataacggaaaaaaaacatgttacaggtataccttgttcgccacggtgaaacgcagtggaacgccgagcgacgtattcagggccaatcggacagtcccctgacagcaaaaggcgagcagcaggccatgcaggtaggagaacgcgcccgtagcctcggcatcacccatatcatcagcagcgatttaggccgcacaaaacgcacggcggagattatcgcccaggcgtgcgggtgtgatatcacctttgactcccgcctgcgcgagctggatatgggcgtgctggaaaagcgccagatcgattcgctgacggaagaagaagagggctggcgtcgtcagctggtcaacggcacgcaggatggccgcattcccggcggggaatcgatgcaggagttgagcgatcgcgttcatgccgcgctggcgtcctgtctggagctaccgcagggcagccgacctttattggtcagtcacggtatcgcgttgggctgtctggtcagtactatactgggactacccgcctgggcggaacgccggttacgtttgcgcaactgctctatttcccgcatcgattaccaggaaagtcagtggctggcgtctggctgggtggtagaaaccgcaggggacgtttcgcatctggacgcccctgcattggatgagctacagcgttaacggcgaatcgggatcagaaattcgcagcgcaggttgatagggcgatcgccggttttggtatcttctgacgggtagtatcgctctatatcctgtcctttacgacgggtcagattcagcattggcatacaggtgccgtaaacggtcaggataaaatcctgcacgccggttcctaacccttcataggtgaacatgacgtattcaccaccctgcaacagcacgggatgcgccgactgaacatagccatcggcctgctcttgcggcagtgcggtggtatagaatacttcctgctcatcgtctttctccatgctggggcgcgtttcattaagcccataaagcactggcggaatagttggcgaatgaccgaggaaatcatgccagaattgcacgcgcatttcgtggcggaagtcggaaatctgttccagcgagcaggaatagctctgcgtgacgccaaggagcggcgtatcttccagcgtaacgaactgatgttccggcacggtaaactcgcccagccgtaatggcgggcgaatgccaaaggcgctccattccgaggagcggcgatacagcgctggcgtctgggaaaactgtttcttaaaggcgcgcgtaaaggtttgctgagaatcgaagcggtactgaagagcaatatccagaattggacgcgcggtcaaacgcagcgccactgctgatttcgataaacgacgggcgcggatgtaagcgccaatggcgtggcccgtcacgtccttaaacattctctgcaggtgccacttggaatagcctgcttttgccgccacattgtcaagtgacagcggctgatccagatgaccttccagccagattaacaggtcgcgaattatgccagcctgatccataaaatatccccatcctttcaacaacgagcacccgatatcaggtaagaggataatagcattttttgttcttttagcattcagtgttttttttgagcttaaatgctttttttaggcaacgtgacaggtaattattctaatcctgtgatctataaccattttattttagaatgtctaataattacgcaacgtaacttttatgaatggtaacaatatgaaatacaagagcttagtacttttctcaattttgttgctgctggggcagagcgcccgcgcggaacaaattggttcagtcgatacggtatttaaaatgttcggtcctgaccataaaatcgtggtggaagcttttgacgatcctgatgtcaaaaacgtgacgtgctatgttagccgggcgaaaacgggcggcataaaaggcggattggggctggcggaagatacgtctgacgccgctatctcttgccagcaggtcgggcctattgaactgagcgacaaaattaagaacggcaaggcgcagggagaggtggtgttcaaaaaacgcacctcattgatatttaagtcattgcaggtcgtgcgtttctatgatgagaaacgcaacacgctggcgtatctggcctactccgacaaagtagtcgacgggtcgccgaagaacgccatcagcgcggtgccggtcatgccgtggcgacaataacagggaaagagtatgcagcaaccgcaggtctggttagtcgaggatgaacagggaatcgccgatacgctcatctacaccctgcaactggaagggtttaccgttgagctattcgctcgcgggctgcccgcgctggaaaaagcgcgtcagcaacggccggatgcggtgattctcgatgtgggactaccggatatcagcggctttgagctgtgtcggcagttgctggaacgccatcctgcgctgccgattcttttcctgactgcccgtagcgatgaagtggatcgattgcttggtctggagattggcgcagatgattatgtcgccaagccgttctcgccgcgcgaagtgagcgcccgcgtgcgcacgctgctgcgccgggtgaaaaagtttgctgcgccgtcgccggtggtgcgtaccggacattttgaactcaatgaaccggcggcgcagatcgcctggtttggtacgccgctctcgctgacgcgttatgagtttctgctccttaaaaccctgctgctgtcgccggagcgcgtgtactcgcgccagcaattgatggatattgtctggtctgatgcccaggagaccttcgatcggacggtcgatacacacatcaaaaccctgcgcgctaaactacgcgcgatcaatccggagctctcgccaattaacacgcatcgtggaatgggatacagcctgaggagcgtctgatgcgcatcggaatgcgtttgctgctgggctactttcttattgtcgccgtcgccgccgtgtttgtgctgtctatcttcgttcaggagataaagccgggcgtccgccgcgcgacggaagggacgctgattgacaccgcaacgctgctggcggcgctggcccgcgacgatctcctttccggcaacccgactgacggccagttggcgaaggcattcgcccaactgcaacatcgcccgtttcgcgccaatatcagcgggatcgtcaaagtgcgcaatgaataccatgtctacatgacggatgcgcaggggaaggtgttgtttgattcggaaaacaaagcggtggggcaggattattctcgctggaatgacgtctggcttacgctgcgcggacagtatggcgcccgcagcacggcaaaagatgctgccgatcccaatagcaccgtgatgtacgtagccgcgccgataatcagcgatggacggattatcggcgtcctgactgtcggcaaaccgaatgcggcaatggcgccggtgattaagcgcagcgaacggcgcattctgtgggccagcgccgttttactgggaattgcgctggcgattggcgcggggatggtctggtggattaaccgctccatcgcccggttgacgcgctatgcggattccgtcaccgaaaaccgcccgcttgcgttacctgcattaggcagcagcgagctgcgtaaactggcgcaggcgctggagagtatgcgcattaagctggaaggcaagaatgagattgagcagtatgtgtatgcgttgactcatgagctgaaaagtccgctggcggcgatacgcggcgcggcggagattctgcgtgaaggaccgcccgcggatgtggttacccgctttacagagaatatactggcgcaaaatacgcgaatgcaggcgctggtagaaaccctgctgcgccaggcgcggctggaaaaccgacaggatatccctctcgcgccggttgctgttgatgagctatttacgcagcttagcgaggcgcgcagtattcagttggcggcaaaaaagatcacgcttactctacggccttcctcgctggttgtcgtcgccgacgcggagcttctggcgcaggcgttgggcaatgtgttggacaatgccatcgactttacgcctgaaaatggcgttatcacattaagcgctcagccgatgggggagaaagcgatcctgcaggtgacggattccggctgtggtattcctgattttgcgctgccgcgcattttcgaccgattctattcgttgccccgtgaaaacgggcgtaaaagcagcgggcttgggctggcgtttgtcagcgaggcggcgcggctcctcaacggtgaggtgacgttgtgcaatcgtcccgaaggcggcgtgctggcctcgttgacacttcaccgtcacttcacataacttcaaattctccccacatcgcgttcttacactgctggcattgcaaaggagaacgctatgttgaaatcccccctgttgtggaaaatgattacgttaggcggcgccatgatcctgctgttaattcccctgatgatggtacggcacaccatcgtggagcgtgctgattatcgaagccatgtagaagccgctattcgtcagagtaccagcggcccacaaaaggttgtcggcccgctggtggcgattccggtgacagagctctataccgtgctggaagaggagaaagaggtccagtataagcgcagctatctctatttttggctgccggagtcgctattggttgaaggcaatcaaaacgttgaagcgcgaaaaataggtatttatcaggggcaggtgtggcataccgatatggcgataaaggcggagtttgatgtggcccgtctgcatgagctgaacagaccgaacattacccttggaaagccctttatcgtcgtgggcgtcggcgatgcgcgcggtatcagcgcagtaaaagcgccgcaggtgaatggtgaaacgctcactgtagagccggggaccggcttaccggaaagtagagagggcattcatatcccgctgccggacagtcagtgggcgacgcgcaacctgacgttggatatgtcgctaaatttaagcggaaccggcagcttttcactggttcccgtcgggcgtagcagtgaaatgaccctggccagtaactggccgcacccaaattttgtgggggattttcttcccggtaaacgcgaaatcagcggttcaggatttcaggcccagtggcaaaccagccggtttgccacgaatctcggcgaacagtttgctgatgcgcaaaaggtggattgggacaacttaccggcgtttagcgtcgctgtatcgacgccagccgatcagtatcaactgacggacagagcgacgaaatatgccattttgttgattacgctaacgtttatggcgttctttgtcttcgaaaccctgacggggcagcggttacacccgatgcagtatctgctggtggggttatcgctggtgatgttctacctgctgttgctggcactgtcggaacatatcggtttcacgccagcctggatcgccgcaagcctggtgggcgcgttgatgaatagcgtttatttgcaggcggtgctgaaaggatggcgcaatagcgtgctgtttacgttagcgttattggcgctggatggcgtgatgtggggattgctgcgttcggaagatagctcgttgcttctgggtaccggcgttctgctactggcgcttggcggcgtgatgttcctgacgcgccatctggactggtattcgctctcttgtcagcaacgtaagtcattaccgccagtaaaagatgacgaattacgtttgtggaaataaatctaacgggcgcgcgcgttaacgttttcccgcgcagcgccagaaactgtgatgccgttagttataggtcaggtttaatgttgccgtggcattcgcttgcccggccgttaccgtggcggcggttttatagtagcgcgcgctaattttcagggtggtcgacatattcatggttccgccgttaaccgtctggctgccatcggcattggtggtaatcgtgtgagtaaagagatcaattttttgattgattggcaaactgccggtaaagaaaccggcgtccggcgcctgaatacccaactgtacgccaacgccggttgcgctggttggcgcgctcgcattgctcaactggatgactgaattatcagggttatttccgctggccggttgggcgcttaacgatgcggaaatagcggtgccttgttcgcaggtcaataggatatcctgctcgcctgtgcccgcggtttgactgttagcgaaactgcctaaattgacgctgcctaaatccacggtgatggcaggtgtttctacccgacatcccatcgctttcataatcaattgcgtattccccaaatacagatgggtcaggatatcgccgccggagtcttccgttgcgctatcgcgaaaagatacgcgcgccagtgggctttggaatgtcgcggtaccggaggtgatcggaccgcctaaggcgaccagttcaacattgtaggcgggagccatcgcatggtgtgttttattgccatcgccattatggtaggtattatcgattggcatgacattatcgtaagggccagcattcgtttgggttttaatcgcaacgcccacgccggaaatcccggtgctaaataccggcgtgttgttcccgtcattcgcattgattgtcgctgatgtatttgactgcgcgctaccgggttcatataaaaaaccgaccttataatcgcgactacagccatccattgtgacttcggaggtggaaacccagcccgattgccacaacacctcgcctgcggtataggcgtggctatccaccacaagctgcgacggcggggtgatagtgatcgcgccttcattaccggaacgtttacaggaggcgtaactatgaccggaatacgcgaacagcagaataagcgccagatataaccttctcatgaaaaattcctgcttttataccaggtgaaatagaaagatgttattgccatgcaatagtgatcgtcacaacggacgtgaaatcccctgccgtgacttttccgtgcggggtatacatccttgcggcgacaggcaaattggcttcatgggtattactgttgatatccaccgtgtaagtgacgttgttggccagattgaccagacttttaccgtccaggttaaaaagctgtaatcctaaatcctgcgccggattggccgcgctgtttgcataaatcgcagaagcataatttggatcgggataaggtacgccgttaaatgaaatcgcggcttttgtggtcgttgccgggcaattcgtcatttttatggtgaaaggaatggtggcggtattgccaccggccacggcgatatccgcccgggcatattgtccaagagagagcgtgtcggggaccgtcacggtacacggatcggcataaattaatcccgtaacgttaatgcctacggcatctgcggtattgtatgccgcgctgatcgagggcgaccataatgccagacccgtgaacgttaacagggcggctaatgcagcaaatctgttcatattcatcttttatcccaccagaatcactggcattgctcgtgtaagatttctacgccagaagcggagggggagctcggtatacgataagagacctgacactggtctgctgctgttggtccccacttcactaataaccgcccttgtttttccagtccggttaaccaggcctgccccgcatcaccaacaaaactgctgtgattgtctggttttgttaaagacgagacggtcgcgccaaaaggaacaggaagattgtttatgcgggttaataccatcaatgccttgtaaccaatattggttttatattcagccctgaccaccgcgccacgggtaggcaccagcgttttactggtatcaatgagctcaatattttttctaatgcccgtcgtatctaaagagacttcattacgatggtaaggcgaagcataaggtacgacggcataaccccgaaaatcggtgtccacgcccgtttcgttattcacggggacacccgctgcgccaggggctttaaccaatatgatggtgtcgtccattggctgggatagtgtcaggccatttcgatgtaacagtacgccgccctgaacgccataattcaggcgacgcatatgattatcgtagctatatccgccgttaatatccgcatacgtcccgttataggttgcgctcacattaccgctggtggctttctcttgagaggaataaccttcctgaacgctccatgagagatttttctgtgccagcgctgttccgtttaaaccgacagtatgcgtggtatcgccgtctttcgcggagttcatattgtaggtggcatacgttgacggcataaaggcatctaacggaatactaatattgattgaaatttgctggtcattactgtcttccgtatcgtcgtcttcatcctgagaattatcggcgttcagcgtataagaatagttaatgccatagcttacgttatgccatgtgttgttatagccaatacctaatgatgtggtatgagtgtcattccagtaatcttcattatataaagtgagtgaaatggaaccgtagataatgtcttgcgataacgacaggtcggtgcgattgcggacatgatcatagtgactattatcgctataggtatccagcacatcctcaagagcgtagtaatctttggtcgaataacggtagccggcgacagtgaaattggtgcctgttgactgaatatctttgctgtaacgaatacgccaggattgtccggtaagcgtatcgctaaccacatcgcctgctttaatttttgaccatgagttggtgacgtctaaagacaatgcgcccagatcgccaaggtttaagcctgtcccgatgagcgccgcatgataaacatcattgctcagcgtactctctattccgccataggcggttatgccgcctgctaatccgtataaggccgtcagttcagcgaagttctgttgcgcggaatgcgtatctgatgaacgcgtgcggcctaccgtcaggtcgtatttcaggtggccttcacgctgtaataccggaacgctggcgtagggcacaatgaaatgctgttcagaaccatcggattctttgatggtgacgtacaggtcgcccgaaccgccggttggataaagatcgttgatggcgaatggacccgccggaacgttagttttgtagatggtataaccgttttgttcaacggttacctgcgcgctgcttttggccaccccgcgaatgaccggggcgaaccctttcatactgtccggcaacatatcgtcatcagaagagatctgtacgcccttaaatgaaatactgtcaaagacgtccgcgggcgtgttattttccccggcgatcagctgtccttttaaaaattcgatatcgcgagaaacataggtgtaggcagaatcccagctattttgcccatcgctatcatgattccaggttgagtagttacgaaaacgccatgcgccaatgttaataccagggcgcaggttagcgtattcgctattttccgtccggttttcatcaatatcgtgatcctgcgatccggtaaaactgtagttcagcaaaaaagcattaatgccttcatcccattcgctggtagggacgaattctcgcgggtcggcgatcaacgcgatttgagggatcgctaaatccagccggttaccgatgacattaaactttgctacagcgccagccagcagactaagatcggtacacccgtttgggtcatttttaagctcggggaagttttctgtttttacgccccactgcttgagttgttcaacgctaagacacggctgtagggagagcttattatctgctgattttttatttttaaaggcaatattttttgtttcaacactggtgttattaatataaatatcaacattataggtgccttctgcctgcccccccttttcgaaaaccgatagatcgacattctccacgcccggttcatcattttccaacgataatggattaaaatgatcatgcgctaacgctggttttatggaacagcatataaagagaaacgataacgctaattgagaacggggctctactctggagaattgcacagtaaaagtcctgaaagggtaaaagtaaaatgaagtcgttaatggctagaatgaaccggaatgcggctctaaactcatcccataatcgctgattaatcgccacgttaccgtgccatgaggggcggcagtagaacccaatttaaatgacgctgatgattttggcggaacgaaggtcgctgatttcacttcatggctgttaagcgtcacactggcaaagttcatataatagggagtggggttatttacggtaataacatcacctgccgtctgccattttaattgttggctctggctatcaggcgttgattttgttaatgctggcggtcgatatataagctttatttgggtattaatggagatttccacgcggttcgcggaggcattatcatcaatagaaggaatacccttaatattgagccagtacatagactcccgatctgcaggtaggggggcgccagagcgaataacccgaatactgttcttttgcccggcatcaaggcgaaaaagaggcggggtgataataaacgcctgcttatttgtgacctggggatcggcaaccgataaccatgactgaacaagattcgctttgctgtctttattctctacattgattgacgactcatcattattgccgtcgaaaaccagtcgggttccgccaacaacaatgctggcatgggcaacatggcttgtcagtaatacggccaacacggatttctttatgtgtttcattttttactctgtaaagatgttttacgctatggactggcatcctgcctgtccacatcaggatgagaatgccttactgatacgaaacggtatacgtaacctgagtgctaacatctccaccggttacggttgcggaaccatcgtttgccatggcggcgtaataggtaaagtctgctgtcgagccgtcggttggcaggtttactgcggcatcatccgtgttatctgtcacatcgctatgtgaagcgttctgaatagaaataccgacacccgcggcgcccgtttccgatccttcgtccgcgtttttgaagtacgttgggttagaatcatctgttgcgccgtggaagcggaacatggcttgggttggtacgccagtccctgcttccgggcagctaaccaggcttacggtaaacggcacgtaatcggttgtggcgcctttttccgcgatgcgttctttgctgtaattacccaaatcaatggtggtatccgtggagccattcacctgaaccgtacacgcctgatcgtaaattttgccattgaacgtaatcgtgttctgggcaaataccggtgtggatgctacggcagttaacattgccaggatgattattttcttattaaacatattaattgttgcctgattctattcgctgaaaaataaagatagccatataaaataaaatattatattttactctgtatgcgcttctttctgttctgtagataagcaggcggctattctacgtatatcaactatgaactcaataaaaattctgatgcaatattgaacggcagtccagtttcggacccggtaacaaagtttaataaaataccactaaagaagtatggttgatgactggatttatagagcaagatctcttttttgataatagttattatttcctggaggatttatttaactctatattgctttatttttaataatatacgacgcttgtccgtttaaaatgaaaccggcaggtttcgaagctctaacagtcttccatgcagtatttttatatagtcccccgcttttagttctgaaagtacctgcatgatacggctgcgtgaaagcccggttctctgctgtatgaagttctgtgcattgatctcaaatcgtgagctttcaggatacgaccacagttcaagtaacagcgcttttatctggctataggcgtcctgcccgataagatttctgtcacggttagtcatgaaagcaatgcggtacatcaggatgttcgaaatgtcacgccagagatgcttttcatcagctatttccacaaaatcttttactgggacaggataatattcacaggtggtttcggcgataaaaaagacttctgaattctcttctaactggtataagtcagcataggcatctacaaggcctaaaatcattggtgagacaccgcagcccattacaatgctgtcgatacgccgacatactttaatagcgcctttagtgattaacaggatgtgggattgattatcaatcttgatatccagtgttttaccggctgtaatagtgacaggggagatgttttgaataacgtgccgatgaatatttaaaatggcttgcaggtttttttctttccctgtgggacgatacacattcccgccgtttaactgcttcatatcttccccattattatggctgataaagtggttgactattaaaaggtaaacataaatttaatattcacttaaaattataattaagtaaattaaaatagccaacaagaatatttaagtcaatgtattcaccttatcaatgcatgagcgacaacgctgtttgtaaggttaaccatagtaaatgtgatgattttatttgcaatcattttatgacagctatcataggtaccgtgcttaacgagcgcgtagagcgtacaggatagcgaagcgatgaacatcgctattggaggatacgaatgagagaaaagtacaaaatgcaggcgggcggcgttttactgagcgaaatcgccgcctgccggaactcctcccggcgggagccataagcggttagcggtactggacgatcaggctttgaatctccggatgatcttttaacgacacgtgccgtaccgtggcgattccattcatcaacgaaatagcgtttccagacggtgtggcgactgtctgcaaatgggggatattattccgcaaacatgatacctcgatattgcgatcgtgaggcgcaagattacaaccatattcgacaatctggcctttgaaatgaataacgcctgcggagaccggcgcggtagcagccagcgcggctgatgaagctgacatcgctgcacaaaacaggtagcagcataatggtgattttttcatcctttgaaacctcacgtcctgtgagcatccccttattttttggggactaacaaatcccgtgtattactctttaatgtaaatacacaaactaccttaactttcgcaagctgagataaacagcgctatacgacaatttttatgtaaaagagtacgtcataacggcaggtcaggagggaaagcgaggccgcttagcggaagggggacataagaaacagccagtaagaataacttaccggctgtttttacagtttggcgcctgggccgaattaatcctgcaggtcgccgcagaagcgataaccttcgccgtgaatggtggcgatgatttccggcgtatccggcgtggattcgaaatgcttacgaatacgacgaatggtaacgtcaacagtacggtcatgcggcttcagctcgcggccggtcattttcttcaacagctctgcgcgcgactgaattttgccagggttttcgcagaagtgcagcatcgcgcggaactcgctgcgcggtagtttatactgctcgccgtccgggccgatcagtgaacgactgttgatatctagttcccaaccgttgaacttgtagctttcaacgctacgacgctcttcgctgacggtacccaggttcatggtacgggacagcaggttgcgggcacggatggtcaattcgcgtgggttaaacggtttggtgatgtaatcatccgcgccgatttcgaggccgagaattttgtcgacttcgttatcgcggcccgtcaggaacatcagcgcaacgttagcctgttcacgcagttcacgcgctaacaggagaccgtttttccctggcagattgatatccatgatcaccaggttgatgtcatattcagagaggatctgatgcatttccgcgccatctgtcgcttcgaatacatcatagccttccgcttcgaaaatacttttcaacgtgttgcgtgttaccaactcgtcttcaacgataagaatgtgcggggtctgcatgtttgctacctaaattgccaactaaatcgaaacaggaagtacaaaagtccctgacctgcctgatgcatgtcgcaaattaacatgatcggcgtaacatgactaaagtacgtaattgcgttcttgatgcactttccatcaacgtcaacaacatcattagcttggtcgtgggtactttccctctggacccgacagtgtcaaaaacggctgtcatcctaaccattttaacagcaacataacaggctaagacgtaccggacacctaataaaactacgcttcgttgacatatatcaagttcaattgtagcacgttaacagtttgatgaaatcatcgtagctaaatgctagctttcatcacaaatttgcaatattccaactagttacgtaagccaactaataaatgtgatgaatccaaagaacaggatctattttaaattaaattatcctaaataaacagtaggataacgatgttctgttaacataaacagcaatagtacagatacgcaatagtgtagcgtcttttacgaaatcaaaaatgctttttcagtgatatcagttaaaattttgtaaatttgcgaagcgtaatatgcttacaaacgccagctaatttcctgtaaattagtcaaaaagagtaatgaaatgcgtgtaacaattgttcttgtcgctcccgccagagcggaaaatattggcgcagccgcccgggctatgaagaccatgggatttactgacctgcgtattgtcgacagccaggcgcacctggagcccgccacccgttgggtcgcacatggatctggagatattattgataatattgaggttttccacacccttgccgacgcactccacgatgtggattttaccgtagcgacgacagcccgcagccgggcaaaatttcattactacgcttcgcccgctgaactggttcccttattacaggaaaaatcacgctggatgcgtcatgccgcgctggtttttggccgtgaggattccggtctgaccaatgacgagctggcgctggcggatgtattgaccggcgtgccgatggcggcggattacccttcgctcaatctgggtcaggcggtcatggtgtattgctatcaattagcaggtttaatgcaacagaccacagaatccgttgatattgctgatgaatcgcagttacaggcgttacgcgcgcgccttttacgcctgctaacgactctggaggcggccgatgaccacaaattaaccgactggctacaacagcgaatcggcctgctgggacagcgagatacggtaatgttgcaccgtttggtccatgatattgaaaaaaaactaacaaaataacgtgctgtaatttttaaaataata

SEQ ID NO: 2 - DNA, 93829 bp, Artificial Sequence
  GenBank No.: CP015158 Salmonella enterica subsp. enterica serovar Typhimurium strain NC983 plasmind, complete sequence
gagtgaacggatgaaacagaaagaccgtctgtacggcgtggcaccggccttaccccgattgcaggctgtgaagctaggccgcaggtccgctatgtgtttaagtactggcccacatttgtacagcagtgggaaaactcgctgaaagccgcacagaaggggctggaaatctggaaatcagcgagggcggatgcctggcttgcgtatcacaacggtatttttgccaccagtcattatgaaggcgcgctcaccagtgaagatatcagtagtgcggcggccgccgccctgaaagggcataaaatcaggggtggaaacgtgaacacgaaaagcatactggatggcagtaaccgactggcacatacgcttgcgctgcagggctagccggtgatgataatgatgccggttaaggaggccacggagaagaacgtgacaatgataccgggcggcgcgggacaggaaactctggaaaacgcggccgtgctgattctggccgggatggagcgtaatgatcgtgccaccactagggaaggcaataacaatttatcctgacgcctccgccgctcgcgtcgttgtccagccccggcaatccgggaaaaacgagtttcccccgattccggcgtttctgaagtaataaaatcactactctaatcaagtttatatgaggtacataatgagactcaggaaaggtcatggattgacgttggtcacacttgcgtgtttatccctgctgggctccctgccagctattgcggcaccgtccgttcaggccggtttttcaccggagggcagcgcaagcagctggttcttaagactattgaggctgcgcaacataatatccggctgatggagtattccttcacctctccggaggtggctggcgctcttattagtgcaaaacgtcggggagtggatgtcagggggggggactggactggaaagccaataccgggaaaaacaataacgccagcagggtgacaatgaacctgctgaccagtgccggcattccggttcgtaccgtcagtgtgtacaaaattcttcatgacaaagtgatcgtcagcgacggtcgccacaccgaagtgggatcgtttaattattcccgtgcagcagaccgttcgaattcggagaacgtgctgtcgtctgggatgactcagtcctagcccgcagctacctgaaccactggacatcccgctgggcgcagggaacggactggaaacagacgtactgacatcccaggaaacgatcctgaaacgtaaaccgtgcgccaacacaggttacgttcataaagtaagtcgctgattttagaaatctgtagtattctctgcaaacgatccaggtttgatccttgaggaggcagagatgtcgcagattgaaaatgcagtaacttcctcatcgaaacgcatttacagaaagggtaatcccttatcttccgctgagaagaagagattatctatttcacgaaaaaagacgacgcataaagagctcaatgttttcatacaaaacatacataaagaaagcttgcagcagctttgtgaagagactggaactactcaggctcaaatgattgagctactaattgaacgggaaatggctaaaagagcctgagataagaaggtgaatgagtaactttcttgatcgtctcgtcagtgagtgttagattgctgatcgtctaaagaattttgatggctggccacgccgtaaggtggcagggaactggttctgatgaggtgtctacccgggaccagaaaagcaaaaaccccgataatcttctcatttcttggcgggaacgaaagattaacggggcctacttaaactgtatagccaccaatcaggctatgcagggagtatagttttatgctcagaaaatttcaatacttgtttctgtggcatttactccttccgtgcattgtaagtgcaggcagaagtgactgacacccgaacactgttcactcattaccgacaggtcaaaaatccgaatccggaattcacgccgagagaagggaaaaagaccctgccgttctgtcgtaagctgatggcgaaagccgaagggttcacgtcccgttttgatttttccgtccatgtggcgttcgttcgttcgctgggaaagcgtcaccggatgccgcctttgctgcgccgtcgtgccatcgatgcgctgcttcaggggttgtgcttccattatgatccactggccaaccgtgtacagagatccatcaccaatctggctatagagtgcggtctggccactgagtcaaaaagtggtaatctgtccatcacccgcgccacacgggcgctgaagtttatggcagagctggggctgattacctaccagaccgagtacgatccgcagattggctgcaacatcccgaccgatatcaccttcacgccggcactgttctccgcgctcgacgtttctgacgtggctgttatggccgcccgccgcagtcgtgtcgaatgggaaaatcagcagcgcaaaaagcagaatctggagccgctggagatggatgaactgatagcgaaagcctggcgatttgtgcgcgaacggttccgcagctaccagtctgaacgtaaactgcacggactgaaacgcgcccgggcgcggcgtgacgcggacagaagccgtaaggacatcgaaacactggtgaaacagcagctgacgcgggaatacgccagcggacgctttaccggcgggcttgatgccatgaagcgggagctgcagcggcgcgtgaaagagcgcatgatgatgtcgcggggcaaaaactacacgcgactgaccatggccaccgtccccatataacccaccagattatgaaaatccggctgacgtcggaggattttgtacgtctgtcgccgggtgccgcctgttttctgcgcggaacgctcgttcttcctgccaaaatatctctcattctgctgccagaatggccagaaatgttcccgcctgagccatttccggtcgcaatattcagttactcacagataactgcaagggacctttccataaagttacaaccgatatactgacaaagcgccaggcgacctgatttcaaagtgcgtggtttcctttaaaccccagatctgtacttcttttaaatacataatctttctctcttataaataaataacctattcatcacctgccctgtggacaggttccagagaatgcccgcccttgcagcggactcacgtccgcgccggttcggaaacaacattagtacctcccgtcgcgacgcgccaggccccggtcatgcaaatagttacaacatccaaaatcctgaccaacgaaaccggagcaaaaacctgatatccagcccattcccaccactgaaaagcgccgccgccccggcccaaagggccggaatggagtcgcttttaataatgaatgatgtaactaaattactgagtggcgttatgtcccgtctggctttgcagggcgatggcccactacgtgaaccatcaccccgccagcagggtattttatatgcagttgtcaaccactgaatcggaacccacgccaaaggcgcgggaccccgcgattcagcagttgacaattttagctaccgtgacgtcatacgttccttttgctccatcccctgaacgtaacaggagccactcagaaccgttttaaacagaaagtaccagcaaagcagaaaaaattgctcagaacgcactacaaactcaattctcatgagtctgccgtggtcgtggtgtcggacctggacggcgggaggaaagtgatgtcgctgcaccggggactctgcggcctgcgaagcgatatcccgcaggcggaggggataacctcagatgaccgggacacgctgtggatagtcagtgaaccgaatctgttttaccgcttcacccgcacggcagcgtcctgaggatgaagcggcgtctccatggcttgaggattggagcctttatgccagaagttacaaccccggattgcagccggatgttatacgacggttttactgttattttgcaataaaactataaaataaatttccgtcaggcttgcatcttgaaggcgtgtatccgtaatatttcctgaactggctgataaaatacggcacactactgtacccgcactgatatgccactttcttgaccgccccctcctgcataacaattaactccgatgcttttttcatcctgcattccagcagaatacgtgtgtaggatgtattctcctctttcagttttttctttaacaggctgacactgacatacagctcgccggcaacccggtgtatggtccagttttcactcacattccggtttatcaccgtagccacctggtctgccatactttgtttcaggcatgtcttcaggaaagggaaaaaaatatcctgctcacaaaaggccgataccagtgcaaacgtcaggaacggattctctggtccggtctctccgtaactgttatccgttccggcacagagtctcaccatcaacggacggaacacagagtcctctgggcaaggctgcacaaggtaccgggggatgtctttcgggatataaaatttaagaacatccacatccagctgccgggcaaaccggcacagcgtttcccttgttatcaccacatgatggtaccaccggtaaaaatgcatctctgtctgatgcactttcgtcaggacaatactgtcctgagcgcaacgaaatgaaaatgcctttccctgattgaaggttgatcctcctgccaggaaaaaaagaagatatttatccagctccattattacctgccattccctcccatgacggggccggtgtttgtactgctctcccccctgaagccccggccgggtgatgccggggcctgtggttgtcagtagtagtgctgcagcagcccgggcatgtaccacaccacaaaccagcttcctgccatcaccacaaaccagaataattccctgaaaaaagatgcgctgaatgttatgtttttcatcatatctgaccgggagcggaagcctgcggctccgctccctttcctgctctccgttatcagaaccggtaaccgacaccaacgttaacgccgttcagtttcgctgcgccaactttacttccctcatagcccagatcgatgaccacattttccaccggattaaactgtacgccggctccccaggcaaaccccgttctgcgctccgaacccgtgaaccgcccgttgtatcccggcatgctgatacgctctttcacttcagccctgccggtaccggcaccggccagtgcatacagagataccagctcgttcacacggacagccggacccgccatcagcgaccagtacgtcgccttcacatcatcacgccagctcattccgccaggaatgccaccggactctccgcgcttacctgactgccaactgaacgacgccatcagtcccagcggcgtctgagcctcatagcggtatttcaggttcaccccacggatatccttaaaatgctctatccggctctgggcatatcccaccgacacggaatgggtgtcagcctgtgccaccggtacggcagccagcccggctgcggacagcagcagtgaggacagaacgatttttttcatgataaaactccctgaacacagttaagttcattgtgttatgacagaaggtgtgctttctgctcctgcacacccgtaacgccgcttcatcctcaggacgctgccgtgcgggtgaagcggtaaaacagattcggttcactgactatccacagcgtgtcccggtcatctgaggttatcccctccgcctgcgggatatcgcttcgcaggccgcagagtccccggtgcagcgacatcactttcctcccgccgtccaggcccgacaccacgaccacggcagactcatgggaaagtacatacaggagcccgttgttccggtcataatgcagaccggagatatccttcaggaaccatggcagggacgcccggtgtgtcagcgagtcactcaccgacagcgcatcagggctccggtccgtcacgtaaagccgcagcggttttttctcctgcgccaccatcagggcatgctctccccgtccccgggcaaggccttcaaaaccggcattgtcgctgtgcctgttcacatccagcgtcaggctgtatgttgccggcgggaggacggtcgtgctgctgtcaatgcagtgggtggtgagcgtccgctcccgctcccgggacagggcatagcggttcccgccgaggtattcgatggcctcaaaatcgtggtcgccgtctgacggtatcacccgcagcacgttcccttccgtgtccagctccaccaccgaggaggggtggtcggtcacggcaaacagcgttctgctgtccgggttccatgtcaggccggagaggccgccgtgtatcccggtaatttctttttctgccgtgagatgccattctgtttcctgcgggtaccaggactccgggaaacacagggtgagcacgccggccgccatcaggagaatggcggtcagcagtgctgctttctgattacataaatatctgaacatcgtggtggtgaaggttatgttttctgttacaggggagaccggactccacatcatgtcccacggctgataagccagatcacgaccaggacgccggtcagaaagccggagataaagacgctggtcagcagcaggagaatcagtgcacggagcgggaggatatctccggcctgtatggtgcctttatcatcagtctgcatcagggttaccggccagcagtttccggaccaccgcagcataacggctcctgaagttttcgacggagaatgcaccgaaggcggcattgttgatatggtaacggccacggacatacacggaaggcgtccccctcacgccatattccttaaacagccgttcctgtaatgccaccatgtcattcacggcgggactttttatacttctgtcatactccccacgactgataccggtggcagacataaacacccggcggacatcgtccggggaatgcaggcgtttctccaccatgccggccgtgaagaaggccttctcgatcacgtcagtttccttcatcaccatggccagcgcccaggcccgtgtcagctcatggccgagggggcccagcaggctgacatggtatttgaccatccggctaccttgcggcagtacgtgccggatggcctggtccacgcccattgtctgtgagaacgcatagcagggcgggcagtaaaaggaaaagaactccaccacagcgggggcatcaaccaccgggggagttatggactcccactcctgcgcaaccacaggacagacgcagccagctaacaaaaaagaaaataatattcccttcagggaaaacagatcccgggcataattcatcgtcacggaaacactccatggataacagatatacagaacgaaaggccgcttaacggcaccgcctgacagcagcagtaaatattaattcatcaggtatggtcattaaggcggcagccggaatattccggttatgcgttttccagaataaaaaatactgacacacaaaagaccattgccattaatataactacggccagacaggcgtaataaataaatttcatgaacatcataaaataactttcagtgatacttatccggcctccggtccgcattccaggccggcttcttccagtgaatgaacccggttcaggtcggtgtacagtgtcaccatccccagaagcatcagggtcggcaacagggttgcatcattccggacgccgaggcgcctgaaagcctggcctttctgggcagaaatggttttgacgctgcgaaaacagagggcagcaatctgcccgctgttatagccccgcagcagcagccggataacccgcagctcagccggactcagtccgccgtcgctgttaaattcgatacaaagccggtcgtaccatatccggctgaaatccccgtcttccgggaaagcggtcagagcagacgccataatccgggaactccctttccggcattcactttctcaagcaccccgacatcgtggagttgctcaagatacaagcggacctggtagatactgagtccggcagcatcggcaatatcgcgggttttaactggcgcgccgtcatccatgttctgacgttcctggacgatggaaataatttttgtaacaatggattcactcataaaccggaattgctctttttatgtaaataaaaacagtctcattaatattcataacacaaggattctaagccaccctctcagccttaagagacatatgatataaatatgtaccagtctgtttgttgcttaatttatcgttgcatctgagctaactaaaccacgtattttgtacatcgttaactaatttacgtctggtaattcgtgttactttttgttctcaccccattagagtcgagacacaactgttacctcatagttatttacgaaattcctcttggtcgcctatagatacgttgaggaaaatgtaatgttattagcgccgggtataacgcagatgctttggcctcagtacaccacgcatggatattttttgtcacctgtcaattatggctatatcgcctgccttgcttatgtggcgtgaagattacgctttattgcagttgcacacttattaacactgtgcccgaacttgtctgtcctggtcgtattgttcctggcgcaagaacaagtttacattcatctccagcacgcattgtcgtgcactgacctccagtagtttttaacaattgtgcatttctggccacttcgctgggagttatcgactgtgttacacgaatagaagcaccaggagtcccactagcctttagtatcacttgctcgaacgcaccatttaccccagccttgctgtttatcgaatctggatgctcaacggtaatactttttgtcgtacctcctgcaggaaagcttgtcgacattacaccattaccgagggtataacgtgctccagatgaagaagtgagtgtgacgctcggtgatggtaagtgatattggtgaagccacgatcccagcgaactggcctcacattcatcatatagggttctagtcgtacggacttctcctgttcggctgagactaaacatcaacgtatagccagcggggagtatatacccttcacccgcaacaatgccattctgaaccaggcccggggcccgaaacattacgccgaaacccttatctgcaaccttgcactcaacttctgcgggatatcgtgttccatcgggtgctataaccatagctgttccattacaggtacgcgatataatttgtacgttgcactgactgaatgaagtcattgttaccatagaaagggctgcttggtctgacttaatcataaagttacttgcctgcatttggtattggtagattccttgactatatgtggatacagttgtggtttttgcatgagcagggtaagtgatgaccgttccccccatgatgatgactgaagcaattagtaattttaacattttatagcccatatttttacgttgttattcactacatagttctttcgtccgatgtttagtcagacccatagtgagttaacctacataatcatttacagagccggtgtcagtcttagccactcggcattcagttgattccggcagcatatcccccatagttcctctggtttcagattggggtacgatgattttctgttgaccgtggtattgcataaacggggttctcttcatcaaacagtagcccagccgtttttactgtgggtaaaccacatcaaaaaccaccgtcacatcaatattcccctccggtgaatttgccggaatatcagtcacagggcggagctcacagttgttcggggagggggatatgcagaaagcatcatcgtccttcccagtcagtttcacccgcttactaccattttccagccagaacagcgggccattatttgacggctgaccgttcatccgcataatgactacgctgctgtcaccgcccccctgcagggttccagtggtgtttcttgctgtcagtgctgtcttcaccacagtactctgcccacaatccactttcacggtaaacggtctgtgttgcatccggactcctttattcattactcccagttgatagttcatcgtattaccgccgttatcaaaggtcagtttgcaggtctgttgcgggttggttaacgtgaatggaatggttatattttccttcgaagccgcttctgtcgccaaagggaacagcagcccagtaaccagcgctcctgcacacacatgacgtttcatccacctgatttcacttcgtctcatcatcctgctctcccggctcacttcagcgtgtagtcctgggtgccgccccagtcgttaacagcctgcaccgtcaccgttccgttcagcgacagtttccccagcgccacctcactcttcggcgccagctgcgcaatctcattcatcaccctgtcgttcagcctgaccggctgcccgttcagtttcaccccggtgaccgcaaagtagtacggcgtcgggttcttcaggtaagcctcaccgccgcggtgcgcaatctgcaggtttttctcggcattacggcgtccctcaacaagcgctttcggccggtaaatcagcttcaccttcgtgttcacggccaccgccaggacattcccttccgacgcctttggcttcggcggaatctcctgaacgttcagccagaacagcgactcacggtctgacggcagcgtgctgtccgtcttcatgatgcggataatctgcttttccttgggcctgaccttaaagaacggcggcgccggtaccatatacaccgtactgctgccctgggtggtgttgtctatccacacctggccgccaaaggtctcatccgcctggttggtcacctcaaatgaggtgttctttctcccttcctcatagataaaacgcgtgccgttcagcacaaaggctgccatggcctgcccgctgacggccagggacagcagggacaccagtccccacttcatcatcttattcacaataaacctcctgaactttgccggtattaggcacaatacctttcactgaaaaatggcagacactgccgtccccccgctcgacgctgacccgtgacggcgcgctcagcatattcatcagcaggacgccgttaccggcaatgaacccggcatccagtccctgctccgtctgcgcgctgcccccgttcaatatccgtccgtcacgctccttcacccgcaggatgtagcgcagcacatgctcggcgccaaactcccggtacacgacagctttttccgtcggcaccacgttaaaggaggtggtctgcagctccaggtcatccggcacgttttccatgtccacgctgacccggttcagggagtaatccgacaggttcaccacggtgtatcccttgctgttggtgggggctgagccgttaatcctcacgcccttcacccccggaatgcgcgccacgcccagcgtgttaccggtttccttcgtcatcatcaggccgctgtctgccgtgcccagaattgtgccgctcacgctgcctgacacggtggtgttatcacgtccctgcgacagcatcatgttggtctggatggcatcaaagccatacgagaggttgccgctcaggctgcggtcgcccttatcactcaggttggtgttcaggccgtagctcaggcggtccgtcggacttgccgacaccccgctgttcatccccatcctgccgctgctgctgtagctcagtccggtactgctgtaatggcgaaccccacccagggtgaacggaatgctaaaggagagcgacgtgctgtagtccggtttgtccaggtacgggcgtttactgtagctgccgttcaggaagaccgacacaccgtccagaatggtggtactgagggaaacatcgcctccgatggcctttcctttcatccaccagtagtcctcctgccagccggccagattcaggttactgttccccaagcgttgcgagaagcgcatctcatagcgtgattttgtgttgtagcgggtataccggtctgtactgtagaagtctgcgaactccacataccccttactctggtaacggtaggccagcaactgcaggtccgagctgtcagagaagcttttggcatacttggcgctgacgctgtgcccgcgtttgttgtctccgttgtcgtatttcgcctgtgacaggttcatcccggcggacacggcgccgaagccgcccagggcctgcgtcacgctcaccccgccggcctggtatttaccgtgcaggatagaagcggcattcagcgtggtggaatcaaagccgtaccccacgcttcccatccagaacatgccgttttcaccgtcagcgaacggttttttcagcttatagttactggacttgcgaccgaccgccacattgtattcaacctccccgggacgcagcagcgtcggcagggtggtgaccggatagacggtggtggttttgtggccggacgcatcctccacggtcaccaccaggtcaccgttccccacggagcggacatcatccagctggtacggaccgggcggcaccacttttgagtacacggcgtacccgttctggctgatggtgacgcgggaggtggagttcgccaccccggtgataagcggggcatacccgcgggcctcccacggcagcatgttactgttggagcgcagtgccgccccgtaaaagccgaaatcagagaacagggcgctgcgggtctgggatttaccgagcagcaggtccccctgcacttggctgatggcggtggacagcgtgatatcccgggcggtgaactcaccggagccgtcagcgtaccgggatgcgctcatgttactggccagcacccagcgtccgaggttgaccatcaggtcggcatttgcataggcactggtgctttgcccggacgtctgcgaggcgttggcggagtacttcaggcgtgccgccggcacgccgtagtcccagcggctggggtccgttttaccgaccaggaacgactggggaatactgaacaccaagctctgggagccatagctgaagtccaccctggtataggggttgcggctgaggacatagcactgcccggcagcattcagcgtggaggcatatccctccaggcggacaggaaccccggcagctttcagccactccggcgacaggcacagggcatttgctgattcttcctgtggcgtaatggacaaacgggctttacccacgttttcctggttaacaatgacgtcgacataatactgtccggccggaaaatccgagccggattttaatacggagggaatggcgctcattccctgcaggaaatccaggttcagctctgagtcagtgctggcaaaagataggtgagaaaataaggcgagactcagcgccgacagtttaaatacccggtgatgaaatgacacaacaacccccctgactcaggcagtccctctccggaggaaattgcacggaaaatacaatttcctgttaaacaggtaataacggaatgcaggatggcgggatgaatatacaggtgctgtcccggcctgcaatcagcgatataaaaataacgaacaaggtaattaaatgcggcgcacggcggtgcgccgcgtcatttaaataaaatatgtaaggttctgcttacgggggattatttgtaagccactgcgaaagatgccacagacttgaagtcaccttcggtcgcaccacctttcagcttggctttgaactgcaggccgtcggtggtcagcttggcaccttcaaagtcaaccgtgctggcgttagcgtttacagcccccgggtttttggagttcacgctttcaaccagtactttggcatcagtagctgtaccgctggttgccccaaagccttcgccatccagggcagcagaagcccaggaaacagtggccgttttctgagccagatttgcacaaccctgtgcattcgggtcaaccggtttcatggcgaagtcaacaaaattacccggctggttagcctgaacggtacccagctgaacaacctggttcggctgagcggcgccgttgacagaagtggtcaggtcacaggttgttgcgcttactgaacccaggaaagttacttcattggcagcgtgtgcagtcccgcccagaacacccagtgcaataatggaagcaataatgctctttttcatgtatataacctcttgaatttaattttttgtctttcacaaaatgaaaatacacattcacattttccagcatggctggcgttattccttcccggacagggcagaaataaagtcagctatgacgtgacatcgtaaaaatcctgagttaccatccgatatatttaataaccaccctgtaaaacaggcgcgcaaatacgcatccgaattaaattcagtgtctgttatctgtttttaatgccaggcggaagctgcccctcagtccgtgaacaacacagacttatgaataataaacaaccatctgcgcagcggcctgactgatgcgtgacaggcggttcaggctggtactgaaatacccgttgttcacttcatagcgttcacagacatcctttctggacacaccaaaaacaaggtagtccctgagtgcctgaataatcttctcactgtgaatggatgatataccgatgagtaaccagaaatgttcctcatttacttttgcaggtatcagcgcccctcttcttattctggccagcatgatttctttgcccaaataataatcagcatcttttctgttcagcatcattggattatctccggctcaatctggtgttgtgacagaaaatttccaaaggaaacaaactttatgccgggaattatatacagatgtttgttttgaaaaagatcatttttgcgatcttttctaccatgcaaacaaaataaatcagaatgtttcaccacaaaatcacaagaaaacaggttaaacgtctatttatcatacataatgcagaataaaagatcgctatagcacaaaaaatcaaaatatctgcaatgcaaatctttttgtacatgaaaagacatatatcaaaaaagaaaaaataaatataaactttcaaaaatataaaaaacagacaaataagcaccagaaaaaacataataaaaataagttcttaacatccgtgaaattattatgtaatgcttcgggctgtgagattatccgagtgtatctttgccttcagaggctttgggcaggacactccgtaagaagatgaaaaaatcacggcgaccttcacgccaaaacagagaagtaatgaccagatctcgtgtattgctctgtaatgtttatgctctccggggttaagagcctccccatgaaagcgctcactggataaaggttatccatactagcaaaaccggatgcaatcaggaaaaaggagcaaatatcctgtcgcttactttcgcttaagatttagttaagatttgttcattaagttttccaggaatttttttcagggaaaacagaaatggaaaaaactttaatcactcttatcattaccactctttctttcagtttgcttgcccggcaaacggacattatttcttccgtagagcaggtatgttcagggaggatttacaggcccggcccccacccagacatcggtttcacaggctaaaaaacagtgggatgatgcgtgggtggtactggaaggcaacattatcaggcaagtcggtcacgagctttatgaattccgtgacagcagcggtactgtttatgtggacatcgataacaaatactggatggggcaaacagcctcgcctgcggataagattcatattaaaggagaagtggatcgaggctgggatggtataaagatagatgtaaaaaacatccaagtgatgaagtgataccggagtttaagaacaagttgtatatgcgggctgcgccgggcaattaaggccagactaactgtatccataaccagtgcgtacgctacgtgaaaaatagccgataaacaacatcatttccttcccctgcaaatttcaccagaacgcgtttcgttgttgccgatcacccgggcgctgtctgaaaaaatacaggcacgacgcgggcacctgccaaaagatgaggtccgtctggtcccgctaacagatataagctatgtcaggcagatggaaggctggatgatcaccacccgttccactggcgcgaacccttgtggaccgccaccgatgaaaccatgcataactgactaaagcaggcagtcaggcgggccgaagctgatggggacatttctcaattccggagacgctgtataccttccggcacagctatatcatgcacatgctctatcacagccggccccggaaagtgattcaggcactggccggtcacaaggagccgcgctcaatggatgtgtatatcagagtgcttgcgctggacatggcggccacactggccgtgccgttcactggtgacaggcatgatgccgcgcagatcctccgaacactcccgccctgacatgacaacgtcactcaccacagcttatataagctgtagtgagcatattacgatatatggagggaaaacgacgggttcacagggctccggcagtaacaggaatgccattctgaaaagtttgtggatcagggatatgcttccggtatgggctgctctcatcactgcttatataagctgtagtgagcagaacactcaccagaggcagtaatataagctgtaataagtaaacagtaatggataactcactacagattatgttcagcgggatttgaagagtttctccaggtcatcaagtgtgatgcccagtttatcaagaagtgcaagtttttcagccatctccggactgacgtcacccggtgtggctggcagttgcgggttctccgcactctcatcatgaggtggctttaacttgggccggcggtagtgaatacagaagagttttgtacgcccacgctggatctcagtgtaatccagatagccaatctcccggagctgctccatggcacgcctcaccgtctggttctgcgagaacacaggggatttcaggttcagacgggcccgtagacgcgccagtgatatcggcgccggatcccgcggcagactctctataaaggtataaagagcctgagcggactcccggcgcttcagggcattgatggccttgagctgcagcagcactttccggtcaaactggtagagttcaaagaggcgcggatcggcttgcagctgaacgatatctttttccgtatcatagtaagccgactgtaccagatgcgtaatgtactctttggtgtgcttctccgttgtgcgggaaaacgagatcacagtacccgcgatacgcttaagtgaaggactgatacgttcccggagcttccgggatgactgactggaggggatcccacagagtttggcgaattcgacaaacgacagctcaactttatcgccaataactttatgccgggcaaaggaatgaatcacccctacccaggtcttgaagtcattatccatatccaggcggggaccagtgatctccactttatcaaacccctcggccctggcgagagacagacgcgtcagttcttccgacgcatcagtacgcgaaagcgtgttctttttacggtttttcagtgacttaagcgtaggaacaaatactccaagccgcatcagagctacaggctgcacggtattactggcattaggagtgagatttacgatttcaccggaggatttatccacctctacaaacaacttttttatgtccagattgtccttgtccagagcgcctccgatcggtggatagtttaagaataaaagcagccactgttttcatgttatagcctgaaaggtgctaaacaacttgcttcagcttatacacagccctgaagaagtttcaggggaacatactcattgtagtttatattactaactcattacagtatatcctttgcataatacagcttattgtttaccagttacagcttatgattaacatgctacagtttaggtgatcatcctccaggcccagtactgacgcggcctttagaagagtcgggatcttcttttgatctaacagggatcgttgtaaggatcttattactggatcgagtgactgtatatgtggataacctgctgaccgacaaggtaattcgtatagtttttcaataatcacttgctgtgactccagtgcgtatctgcttcctttaacttctgtttttttgcgcttccttgccggttcgcgggcttattcccggtcatactcttcctgacttattaattgccagcgaataaggtgaagtcgcatttctcttatctggtgtattgtgaatcctgtacggaccagcagtgttttcaaagctgaggaagtatcttcttcgtatgaagctgctgagagggagaaggcctctggtttttctcgcaaaacatgcagtaaccgcgccagtgtcggcagtaaccggagtgtctccccgggagttacaacggcctgcagatctgtttctgttaggtcggtgagcccctgtttctgaaattcagcatccatctgccggaaccatcattgtggatcagcagttacagtttaattcctcctaacgggaactgaacgagttttatttcaatattcgcgaacaaccgtgggaacctgaaccaggattgctcgttatgaatatgacaaacatgccagctgaaccacttattttccagtcgggtacgcaaagtgcagggttagaacgggttaatatttatttctggattttcaggcaatttatggaatagaaggaattaaccaagcctcttgcgtgccttgtttataccaatcttaagaccgccagaacagacagcgtttccctgcagtcagttggaaaacgttttgaggcatcttttgaaaattaacctgagcctacagcagagaaaatggctcaggtacgtgaactgtatgaattagaagaggccagacgtatgccatatgtgatgtccaaataactcttttaataccggttatatatttacgtttacctgtcccctctcagggacaggtagttgatccagtttgcagacggcgatttctgaatctctttgtgtcatgtaatgacgtcaggaaatccaggactttatcatcgctatccatcgccaagtcatgcaggaacagaaaaaatttcccttcattatctgccagatgcgaatcgagataatgtaataaccagtcagcatgcctcaaaatatgacgttgttcccgttgcagacgctttaacggaaggcgtatcgtcattttatccagtttttgagcctcctgagagagttgctgctgcatgattctcagttctgatttaagcgcctgcgcgggggcgctccggctgaacagtcttttggtaccgagcagtgtatctaccatcattttgtggaccttttggcactgatccatggaagcctgatatttcttaaagtaatagtgggtataaacgcccactccagataatgcaattgagataaatggagcaagtaatgctgtgttcatgaaaatctccttacaagtaggtggaatggccacgtgatgtggacgacggatgaaatataacccactttagcaatttgtgctatcagtttttgcaaaaagtgctaattttaattttgtgtattgatttgttaatgattatgtgatttgcctattttgtgtcttcccctttcacctgagatccgaaaaaaggtagtcccggatcttctttatcctcaccggtgcgccgcgacccggtaacacaagatgtagcggctcagtcatctgctgttgctaccagatgttgtgttataccccttccctgtgacccggcgcgcagggcagaaaagaccgctttgcttattccctgaccgtggtacacttccggaaagtcgtgaatagacaaaaaatcggatcacctgaaaatagccgtcctgtaattccgttacgtttttataagttggattgtaattgcatgtggttaaagtttcattatgaaaaagatgagtgatttactaatagcgtgataacagtatgcgttttaaggattgaaaacatgcatcagtaaaatgcacgagaaaatacatataagagatatgtagataatggcggcgaacagttaactcagtcactataagctggttaacagtattcacaatgcgtggcagatttttgcttcatcggaatgtatacttaattgcatacctgaagtatgtaaaaaagaggtgaatcatgaagcagcgaattacagtgacagtggacagcgacagctatcagctgctcaaggcatacgacgtgaatatctccggtctggtcagtacgaccatgcagaacgaagcccgccgtctgcgagccgaacgctggcaggaagaaaatcgggaaggtatggctgaggtggccagctttatagaggctaacggatcgtttgctgacgacaacaggaactggtgatatgcagtttaaggtttacacctgtaaaagggagagtcgctaccggctgtttgtggacgtgcagagcgacatcattgacacccccggacggcggatggctgtcccgctggtcagcgcccgtctgctgtcggaaaaggttccccgcgatctttacccggtgatgcatatcggggatgagccttaccgcctgctgaccacggatatgaccagtgtgccggccaccgtcatcggggaagaggtggccgatctcagcctccgggagaacgatatcaaaaacgccattaacctgatgttccggggatctgatatgcgtgtcagcgaacaggtgctgctcagtagtctacgtcagggcggctgtgtgcggagtttctggcgccgctccgccagactggcgggtacgccctctccgatcgttccggacgggcttgtgctggaaacccccggtgaacgcggggataccccactctgtcatgtggattttgcggtggtacagaagtggctggtctgcgaggaaacctggacacagaccctcgggggaacggagttcggcgggacggtctggcgactgcgtactgacagggagaacaccacctcatgacacggtcacgcatctgtccggatactgaatccaccggtctcagtccggcatcggatgccctgccggtcagggagacgacagaacagtttgcacaggtctttttcggaaaatccgtgtccctgctgacgccggaagagcggttcacgacggtgtacgccggctcccgggatatacctgcggatttgcatccggcgagctggtttccggccgacacctggtttcgtaacgaacttcgcgcctgcgcggcctatgtcggacgtcgtcagggctggccactgtatcacgcttcagaagcggaacggctgcgcgcactctatccgctacggctcgccacgcccgcgaccgatccgggaaaacaattgctgacccgtacggcgctgctgaaagcgggttactcacgtgccacgattgcggccatgacaccggtggccgaacggcagaaccgtcacagcggcgactggtatcctttatacagggttcagactgaaaccagagatgactccggggaaaaaacatgatgtcccggaatatttcacttaacggagagaggacatgagtcagccaccgttacctgctgtctgtacgcaggcagcgtccgccctgctgccggtggccattgattacccggcggccctcgcactgcgccagatggcaatgcagcatgacgactacccgaaatatctgctggcaccggaggtaagtgccctgctccactacgtccctgatctgcatcgcaggatgctgctggccactctatggaataccggcgcacggattaacgaggcgctggccctgacacggggagacttttcgctggcaccaccttatccgtttgtgcagctggccactctgaaacagcgggcggaaaaggcggccagaacggcaggacggatgccgtccggcagccagccccaccgcctggtgccgctttctgataaccagtatgtcagcgaactgcagatgatggtggccacgctgaaaatcccgctggagcgtcgtaacagacgtaccggcagaacggaaaaggcgcgcctctgggagatcaccgaccggacggtccgtacctggattggggaggcggttgaggccgcagcggctgacgacgtgacgttctcagtcccggtgacaccccatacattccgccactcctatgcgatgcacatgctgtacgccggcataccgctgaaggtgctgcaggcgctgatgggacacaaatcggtgagctcgacggaagtgtacacgaaagtgtttgcgcttgatgttgccgcacgacaccgggtgcagtttcagatgccgggtgctgatgcagtggctatgctcaaaggaggttcatagagacgtgtatgcatttttcagcctttcgcctgcaacaggccatccggaaccgggagtttacgccgttttatcagcccattgtctgcgccacaggaggggaggtggtgggctgcgaaatgctggcccgctggctgcatccgcagaagggcctgctgagcgccgggaactttattcccgccattgaagccaccggcctcggcggagcgctgctgcgcggactggccgacgaggtctgcggggacgggcaggaccttgcccgcagtgccggccgcaggctgatgatgacgctgaatctcagcctgagcctggttatgacgccgcttttccgtccgcacctgctggccctcagcatccggctggagcaggccggcatgacccccgtctttgaaatcaccgagcgggaagatatccgcgcctttcctcaggcggcggtattccgccagcttgccgccggggggctgcggttcgccgtggacgacttcggcaccggtcatgccggtcccgccagcacggtggctgatcggatgattgcgcgcaccgtcagtctggcccggtgctagggggcccgggtcattgccgaaggtatcgagaccccggcgcaggcggcgcgcctgcgggacgcggggggcgattacctgcagggctggcactgcggcgccccgatgcccttcgggctgtttcatttccggctgacgcaaaaaagccagccggcctttggttaagttatgcgcacaggagtcatttctatgaaccagccgttgttattccggaccgttgccggcaggcagagcaaccatgaagggttttacatgcccccgggcatccgccatctgggcaccctgtccctgtaccgggccgtggcctggtgggggctgtttctgggccgggagtttacccgcgatgacgtcagcgaggcgttcagcattgagccccgccgtgccagcggtatcctcaattacatctgtaaccgtcacaatgacgacgacatttgctttgattcccgcctgcaccccgtgcggggaggccgcgcccagctcgtggtgcgtatccgggcagtggaatcccgcccggacaccatccgccggcagcggacagaccggccgggcgggaaggtgagtgaccggcagtatgaccgccagatggcgcactggctgctgtcccgcccggccggcggtgatacggcaaaactagccgcctggcaggcagcctgcccggtccgggaggcatcatgctgattatcgtcagtgactgtcagtttacccgcctggcgctgacgcgcctgctcgcacatctggaccccgtgaacatgagtgttgcccggtggttacagaccgcgccgccggcaggcagccatgtgctgctggcggcctctcccggcatgctggcatcgctggtcccggcctgccatcacgccaggacatcactgtccctgaaactggcgctgctgggctcaggaggacaggctgtcttcctgaacaccctcggtctcaggccggactgcctgctgccgcgcaccgcctccgcgactcagctgaaggccgcggtcagcagctggctgcgccgtgcgcggggctggcggcaggcgacgacggagagtctctccctgcgcgagcgacaggcgctgtgtgccacgctcgccggcctctccgcgcgcacggcgcccggctcggcatcagccccaaaaccttttacggccatcgccgcagcgcgctgaaccgcctggagctgctggccaatccggtgatcggcctgcctgaccctgcggcgcactacagcatgatgctccacccggggtcgccgccctttttcagcagccggacgaccggcgccggtagccacaacgtttctgcacatcaccccgtgcaccttccggtaacacaccgttctcattatacggacatgacactatgaaattatcctcctgtactccccggcgtggacggggtgtacctgggccacattgtggatgcaggccaccacaccgctggttttaacgctcacgccggccatgacggcccgggcggacatcgcgtcccggatcgggcagagcccgttctctgccgaccgggatgccgccctcgccgggatccggaccgtgccttataccctgaaaaagggggagacggtggcgcaggcgcacggcctgaccgtcccacagctgaaaaaactgaacgggctccgcactttcgcccgcggctttgaccacctgcaggccggcgacgagcttgacgtgccggcggtcccgctgaccggcgggaaaggtgacaataaccgccatgacgcccgcggtccgtttgctgctgaccgggaaaatgaggacgcgcaggcgcagcagatggccggcatggcctcacaggccggcagcttcctcgccagccatccggacggtcaggccgccgccgggatggttaccgtcacttccggccgtctgacatgctcggggcgaacatcttcctcgactatgacctctcccgcgaccacgcccgcgccggcttcggcggagaatactggcgcgacttccttaagctttccgccaacgcctatgtcggcctgaccggctggaaaacctccccggatgtggaggactacgaagagcgtccggccagcggctgggacctgcgtgctgaaggctacctgccgtcgtacccgcagctcggggcgaagatggtgtatgagcagtattacggaaatgaagtgggcctgttcgggaaggatgagcggcagaagaacccgcacgccctgaccgccggggtcagctggactccggtgccgctgctgaagctcagcgcggagcagcgcgccggcaaggccggggagcatgacacccgcttcggggcagaagcgagttaccgcattggtgacagcctgcgcagccagctggatccggatgccgtgggcgccctgcgcagcctggcgggcagccgctacgacctgactgaccgtaacaatgacattatcctcgagtaccgtaagcaggaggtgacgtgccagtaatttcacgatgcaattgtgcttcaatcaccgggattttcgggattctgaccgcaccatccagcacttttaccccaacagcttgccgtgtttgcgcttgaacatagggaagcgggcttttagcttcggattgaagcagttggaaaaggcaacatcgagattgatcaccgcctgttgcaacgcaatagagtcatattcctttagccatgcgtatttacggaatttacggaattttttcgctacagccagaagcggtttaatgtctttacgcggggttaaacttacgccgtgtcgttgataagcgtgtttcttgatatgcagagatttgctgtacacaaaacggactgcaccgaactgggcgttaaggtgctccgcctgttccggtgtcggatatatgcatactttcgtggctcttaacatattcagcgctcattaatatattgtatttattttaacatgttaagtgaaaaattcaattgagtaatcaccacgaatcactggaaggctttcttcgtaaacggcatagtgtaagtaagctggttgtgcattaatctttacgacaaaataccgctgcaagctgtttgacgggcagattatcgctcagttacgtgatgcttttggttcggctgcggcaaagttggagtgcgaaattatcgagatggatggtgaacaagatcacgtccatctgctgatagcgtatccgctaaaactgggggtcagcgtgatggtaaataatttaaagtcggtatcgtcgcggcttctccgtcagcagaatacccacttgcggatgcagagcaaaaccgggctgctgtggtctcgttcttactttgcctgtagcgccggtggtgccacgatagaaacgcttaaagcatacgtgctcagacagaatacgccggagtagcctgccctaaagcccttcgggcttttcgccttatatccccgcccgcattgggcgagggtttacagcggatcttgctaaggctctctattaacttaccattcataaaatgaatatttaaaaaagttatcaatcgtgtttttcatcataagccctgacataaaattcccctgatgatgagaagtgtttttttatttcttgtaagctaggaagtatgttggatgttttccaagaatcaatgaattgtacatatggttttttatcatattcacagataaccacagcgttgaaatcatgtctacattcgccaattattggagctatgtagttctctgcgctaatgataaaagaactttccctcttaatgtcataacggtttaatatttctttttccacctcatcgatggaatttaaacaatatgattggttaagctcatgaccaaaaatgattttatcaacaatggcgctgtctaatcccactgtaggagaggcagtgttcttcgaacttaatatatcctgtcggtgatgtatgttataatgtaaacacgctgataataaaacgcagttcccagagtaatggacgtatgtattatttacatatctagccatttgttttaaattatctcgactcaaattttgtggatacaaaattctctcttttgattcaatacaaagcgcatctttaattctcttgacttcatttgaatcattattattgatattttttgaatttatacgtgatattatatcttgggatgacgcactaccagaaactctcatagttacactacctcaataaaatgcatattacaaaacattaaatataatatttttcaaaaaacgctcttgcttatgtaattttcaccattacagtgcggacatatcaatatgcatgagcgttattcctttacggtgccggaattcgtcagtaaggggggagccttcaatgaaaatttgtaatttattgattaataaattaatgagcatttaaaatagctgtttaacggcgtttactgttccgttgctccccaaacccatacttactctgtcatcaaacgataaaacggttcctcacgtaaagcctgtctctgcatttcgccaccatcacgcccacttcgtagttcattacgataactgagatatttccaattttcaggatgaacgtctgactcaggacactgtcctgaaataaccccattttcggatagtctggattccagacactctataaattgccgtgtcttgtggagaaacgacgcactgtactgcgaattttcctggtctggttttatatacaacgtgaactgagcgcccaggctaacacgggcttgttgaacgaccttctccatatcggtcactttccacttatctaccggactgtcctctgaaaacagcaatccggacagcgcttgaaatgcttgtggcaccatatccctgagcacactgatgtggaacttgtcaccggcaaatttgccctgagactgaggtgattctcgacgagcatggatgaaaacatcgtaaccatggttattcagctgaaaaccttggctcatagcaaagaaaccactctggcgcatccctgaatagtcaggcacatccagcgcctctttaaagtgggataccggcatcttccgcatttggttgtgcaaggagttgaaattatttttcaggtgcttatttgtagatggtatttccgccccatcataagcagctacaatattcaaaggagggatgtttagatttagattaggcctatttatgggcatgggaaatctcctttgcgatatggatatatcgccatattattagatataaattctcagttttttttaataaaacgattagttatccagaaaacctcattttttatcaggcgaaaaaatgatatttcggtccgttccgagcagaaagttaaagaagggtaatggcaaaagtttagatgcactactttgcgggcctagggtgacggaaaaatctggggttccggagtataaccccttatagagctaggccgctcataccacttctggaatagattcttagtatctatgagttgagtaccctcatgtttattattctttttatcctgtttgtgtcagcagttgcatcatcacttaatctcagcttactaagctggcttgcaaagtcttgggatccacaatttacaatgctttcgattttgagtttagtatttggagggaaaagcatctctgcctctcccttaaaatgtgcaacatctccgagtattctacctttatgtcctttttctaggtatatgttgagaatagtgtcatttatccatgccttatctggcgatgtactcataaaagctttatctattattatattacctatagtagtgtattccttcagcacatccgataatgcgggcttatcaagcttcaggccccggtatacgactctgtgatctgtttcgggaagtgaacttaatccctccgcaatatcatttatataaactgacatggcatttttaaactcctcatcactgggttcatttgtggaaagatagtctctggagagcagagtttcttttgcctgtgtttcaggataatcatccccacgtaaatatttattaatcacactgtacccttgagctgaatagtacctcagagcttgaatctgctttgattcctctacaatcgcccattttgattttggtcgagatgaattacctcccatcatcggaggaggcggtggcggtggcatcatattgttgacaggagctcttctataaccgtcgccttcataggccagcgtccgagcagcgcaaagctgtgtcagtatcggattttcgtcatactccagcagcagacgggaaaccagcgtatcggcttcacccagttcatcaggaaagtggtggaacatcaggacttggcggcacaggcgatggaggcggatctcaaagccgtagttatacagggagaagggatcctggcgggcgagccagctgttctgagcagtgaatgcaggcggtacctgtggatctacaccacgttcgccgtagtcaaacactagggtgaacagccactgtaccgcgggtgtggcgctagtccagaggtacagatcggcggcgggggtcgcgttgccatactgtaccttgctgagatagcgcatggcgctgcgatcgcgtccggcctcgttcccattgaggtccacattgtcaccgttctccgccaagtaggagtaatagatatgctcgccggcaggggtcaccgactcctcaaccagccattgcgccgtatgagaggcggcctgcggatcgctgaggcgtgctgcggcggttttccccagcaggtgcaggatgccgttactgtcatgcagtaaccagaaatcatcgccgttgctgttgcccacccagtactccaggcgataaaaactgctctccgtgcggggctgatagcgggtcaccgtgtagctttgcgggaacgatacgtcaccgtacgcgaagcaggtgacgggattgggggcatcaccggtgctgagcgtttgaaccagcacttctccgtccggccccagaaactcatcgctgtcgttatactgcggcacgccatggctggtgcggcgggcaatgctcattgtcgcgcaggaccagcccacgccgaaggggccattgccgccaccgctgctgtagtgcagcgccagcgcaggcgcaaagccgcgttcggcgctgatgggcagaggcagcgttatactggctaggccgtcagggcctgactgactcagcgccttgcccccttttggcaggaaagggggagtgatcagcgctaaagtggcagatgaaaaaccatttagtatcaacatacactatctcctgaaactggccgtctgacgatggccaggtatattttctgcttacagcgtctgctctacggcctgttcaaaagtgctgccgccgtacagcgcggtagaatgcacctgaacaatgacgtcgctcagattctgcagaatggtctgctgctcactactctggtagcgcgggaagctaaactgccggctggcacgcagagtacccgcaatcaactgttccacctgggggaacggtaatcgctaactgtcgggcaaaggtattcagtgcttcaaatggcgtatagtcggcggttttcagccccagattggtctggtaaaaagaggtcaggtcagtggcggtactgttgtccggctcggtcggcagtgtctgctgctctggtgacagccggctggcgagctccatggcatagttactgttatcgccggtcagcgagttgctcaggaaccacggccagtcaatgctgctctcgctgataatatcttccagcgacacatcggtattcagcagagataactccacctggtcgtgtggaaaatgatacggcagcagggtcggtatttgctggttaatggcatcattaaccaccatcagggtggccaggtccggccgacgctctgcctgtccctgaataccgccgacagcggaactgctcaggttcgtgccattgtccggtgtctgctgcaaggtcccccgaactctgcgggtcaattgattttctcggaacatgcagcggatatactgcgcctggcccatcgccaggtcccaggttttacctccgcgggagcccggccatgacatattggcgttaataaactgtttacgggtctgacggacaatatcaaacacggaataataattatattttgcaaaattccctgccgggacccggatggcggtttcgacctgtgaaagtgccggactggtggtctgattcatattcataaataatgatgactcctgaaaataaacagaatgaaatcctgaagactgataatgtctgcaggggaattattttgtattgccagaaaatgagtggcttatattgagtttatttatgtgctatttttctgctgtgcggaatcgcggttcccggtgtgcaaagatggcacaacaaattaactcaggaataaacaacgttcagcgctccggcgtcgggtcaggccgggaacaacctgaccgctggcgtggtcccatttcaggaattcattcgctgcgccgtcatagtcaccgttattcagtttcttcagtaaagtggcgtgagccagcgcgttaatgcccatgttttaggtaatccaccagagcatcaaactgattctgtgtcagattgacggcgaccagccggtttactccatgctccgcggtgaactaccgctatggaggatggggattgctgacaatctgaatctggcaaatgccgtgaatacaggtgttgcggcccttacgctgcataaggtcagaaggtggactgtttcagttcctgctgtatcagttttatagctttacgataatctggtgtctcccgtttcttggtcgggtaatacaaggaggtacagagcgctacgcctttgatgtgcagtgcgtgatctgttgataatcccagagcccgacagactctgacggggatgagtaacatcgccagcccttgttgtaaccggtacagtgaactgaacaaatcgacgttatcaaaactgaatgcagggttggtaatacctagtgtctgttcaaaaaaatggtatatggtgtccagattaaaatttttagccccctcatgaaaaagtacaggtgttccggccagcctgttgatatcaggtttgccgcagagaaagaattttttaggaataaataacatgaccccaccctccactgatgtccggcagacaagcgattcccgatgaaaataatttctggcagaaataacaatgcagttgtttgtctgacacagttcttctattatttggctgttaacggctctccccattatatttgttttttggccggaaatggtcagtgctgaaatgatcagattttttaaacttcccggataaatttcgtcaaatattatttctagttgtttcgttttacccgtaggtccgatttcctgctccagtgcatgtaagaaaatataatgggattttacttttcgataaatagtttgtgcaaattcggttgggataagagtgccattcttccgtataaagagtctttgtttcagctctctttccaggtctgaaataaccctgctcagcggggttcgggtgatatacagtactgatgttgcgatactgaaggaacctgtttccatcagtgttatgaaaatttttaattttttattaatcaagaaatccataatatctccttttttttttcagaataatcctgaaaaaatgttttgatgtgcaaaaacaggatggcggtgacctgtttttgcacagactgattagttcttactaatcatggggttactggataggattatgggcgatagattttatgcataccctgactttatttctgagtggatttaattgacctgttatgatgtatagctggataacaacgatgtatacccatgatcaatgaagatgcttggtttcaaaaataatcaggatcatgctgatggctatgaatgttgagttgaccgcagaacaaaaaatcgctcttgaagcattacaacgaaaaagtcgcgatcccataaatgaacagaaccgatgtacgaccgggccggaattaaacgggaggcgttattaggcctggcgcactacaggacagaatgcagagcctttttataggttcagtcgaacgaaaactcacgccaggcgagaaaggttgtctgaaaaatcgattagtgtgcactaaatagcttcgcaaaatagtagatcactgaaagggaactcagcccggattgtgcgatctgatcaatcgccaaacatcacaaatcaccaaccggactgagcgatgccgatcatagcagcaattcctgatgaagaacgacaactgatgcgcaaagaggcccaacaaacccacgataaaaaccatgcgcgacggcttatcgccatgctgatgctgcatcagggaatgaccgtcactgacgttgccagattactctgtgccgcccgttcatccgttggtcgatggataaactggtttactttacatggtgttgaaggactaaaaagcctcagacccggacgtgctccacgctggccggtcgctgatatccttcagctcttgccactattggtacagcgttccccgaaggattttggctggctgcgctcacgctggagcacggagcttctggcactcgtcatcaaccgactttttgatgtgacgctgcaccgctccaccctgcaccgatatctgaggcaggcagatatggtctggcgcagggcagcgccaacgctgaaaatcaaagatccgcactatgaagaaaaacggcttgtcattgatcaggcgctggctcaggagcagactgcacatcctgtgttttatcaggatgaagtcgacatcgacctgaacccaaaaattggcgctgactggatgcccaaagggcaacagaaacgcatcgccacgccgggacagaaccagaagcattatctggcaggcgcactgcattcaggtacgggacgggttcactacgtcagtggcagcagcaagagttctgatttatttatcagtctgttagaaacgttacgccgtacatacaggcgggcgaaaaccatcacactggtggcggataactacatcatccataaaagccgcaaagtggaacgctggctggaagaaaacccgaagttccggttgctgttcctgccgatgtattcgccgtggctgaatccgatagagcgactgtggttgtcgttacacgaaaccataacgagaaatcatcagtgtcggtacatgtggcagttactgaaacaggtagcacaatttatgaatgccgcttcactgtttcccggcaatcaacagggtctggctaaagtggagcggtaatatgcgaagctatttgtagcggctcgcaatcgaaatccccccgactcgcaatcagcgccaattttggctcacattaactgcaaatgaaaaacgccaccggctcacattaggtgataatgggctcgcatttatcctgcccggctcgcaatccattccaccgggctcacaataactgcaaatcaacatcgtcatattggcagaccgaccgccagcattctgtcgcgtagttcggccgtgcgggcagggtctaactgattattaaataatgccctgatttcagctggttttgcatcgaactgctccaccatatccttcagccggtaaccatgtcgcgtgagcgtcggctccaggtcatccagctgacgtgacagcacggattcaaccagagtggcagtaatcggtttttcgcccgtctggtatcctgcttccatcgccagcgtcaggtgcaactggacctgcagcggtgttcgcagtttcatcgccagcaggtcaacggcttcggtcgttagaatatcttccggcttacccttaccggtgctggtcttcagcagccactggatatattcacgctgactgccggtgatcccgtccagtgtaaaaatatcggtacgatagccaatttcctccatcgtcggacgacgcaggtcattacgcagttttgggtgaccggccagaacgacggacagcctaccaccgccgtcttcaaccacttccatcagccgtttgagccccgttagtgtattaccgttcaggtcatgggcttcatcaacaaacagcgccaccgggcgtttgccttttttgaccagttcctgcagctcacgctcgcggcgttcaccttgtttgtggatctgcacctgtttatcctgtgccaggtcataaaacagggcattaatcagcgtggcgagccggacactctgtttgtccaccgacagggagcgggcgacaatgattttattttcatccagcagttgctgctgcaggcgtcgcagagtgacggttttaccgcttcccaccacgccacagaccgctatcagtcgtccttcgcgtatcgcacccttaatgtctttcatcagctgcttatggtgggcagtttcataatacccggcctgttcaatagactgcgtcagtccataatgctccatcacttcaacccgcatggtcctctcctgattgtctgctacgaaaatagtctctgatgcgggcgagtacttcactacggttaagcgtctcagtcagaatactgtcgataaacgcccggtcttcatccgacattctggccagcggtatggccagatcgtcggcaattgccagttttgccgcaataacggtgggaaagtggtattcaaattttcgggtatcaaagggctgatgtggcaacgcatcaatgcgctgctgagtgtcatcactgaccacgcggagatcgctgccggacaatgcgctgatggggatgttcagctgcctggccagagcatggatacgatcggcccgttcagccgctttaccgcgtctgaacgtccggtaacggtgcagcggcacaggccccgacaccggataataaggcccccatgtttcaccggtaaactccacatacatctcttcgtcaaacagcccccacagcagaatgacggtttcacccgccatatccggttcaacttcccatgcggtgccgtctatcgttatccgcgcatcaacacccaccttgcgggattccggctcccgggcgaaccgacagtattgttcccagctgcacatatccctcacaccttcctggccgatatttgccagccagtcctccagtcgggagtgtttctcgctgcggtgacgctgcgcgttataacggctcagatagttccagagccattcgttggcctgcagctccgtttccggtttatggaaatggtacagagtttcatgtgcctccttgacggtccggaaaggacgttcaactttacctttggaccgtgccgtcgtccgggtgccgtccttgcctgccggcgtatgcgtcagccagtcaaccttcagggactgcatcacattctggaatacatggtttttggccaccggtccattatcgaggtacagcaatttcgggcggccctgaaaaggaaaatcagacctggtttttggggccatggcgttaaagagaaaacgcagcgcagattccgcatcctcaccgtacacacaccggtattcctggtatgcgacaccgctccggtcatccactacgctgaacagcatcagcgtgggttcgccccgggcaggatctacccagtcaggccgctcaatatgtttgagatcggatggcgacatatcaaactgccaacagtcattgctgttttcagcctgaaatcttaccgccggaggctcccgtaacaggcggggctggtcgagacgccagcgggaaagccagcgattgacggtctgcttacgaagtaagcctttgggacttttaatcaatccctggaccgtctccacgccatgctcttccagcagctgtattgcccgtccggtcgacagatggcggccggatttatttgtggttcgtaatttcagtgcagcaatcagttcgcagtaatgctccagctcggacggtggcagtatccggggttgaccatgatcactgcggtgggccgttcgcggtttcaaaacaaggtgaagagcgcgataaaccgtcgtgactgaaataccatacagctgggcggtagcggcaatctgattggcacgttcagggctttttggcggcaggcgatcgagccgttgccgtagttgcaacagggagtcagacggaatcgcgctacgccggctgctcataattttccagcgcccggtagactgacgccctcccaatcccgagctggcgggcgatggctgtggctcccatcttctcaatggtatacagacgatataccacagcaggatctatggacggtttccttccccggtatacgcccctggctttcgccgcggcaatgccttccatctggcgttcacgtctcagattggtttcaaactcagcgaaaacacccagcatatcgaggaaggctttgcctgcagctgaacgcgtgtccactggctgttctgttgccctgagcgttacgccctgttgattcagggcatacacaatgtcctgcaggtccttaatgctgcgggccaggcgatccacgcgtgtcaccatcaacgtatcaccagggcgcaggaactccagcagcagctgcaactcgctccttccggtccggccgcttccgctggctttttctgcacgaataatttcacaaccagcagcgcggagaatttgtgtctgcagagtaagatcctgatcgctggttgaaacgcgggcatagccgtaaagtgccataatggtgaaaactgtctcgtttaactctagatgatgaaaacgtaacaccggaatgggataaaaacaacccaaatgagacagaaaaactgtctcaccagactgtgcgttttgggtgtactcaaaaaatacattttcattccagagaaaatttaatgagctcttaatgtaatgcgaggctgactgtattcggactcggactgcttcagttatacttcgaaaaactcaaccttaccgccagtaaggtgatacatactgccaacgattttaattttcttctcatcttccagttgtttcagcaccgggctgtttttgcggatgttttcgatagtcagctcgacattttttcgtgccaccgcatcgacaaaatcataattgctacctttacgctcaccgctatactccgtttttgcaatcgcgggtttaatttcatccagcagccccgtcaggttacccagttcagcattatcaatagcacagcgtactgcgccacagcgggtgtgtcctataaccagcactactttcgcgccggcaactgcacaggcaaactccatgctgcccagcatatcgcgattactgatattacccgctacgcgggaattaaacgtctcaccgatccccgcatccagcacaatttccgccggcgcacgtgagtcaatgcagctaaggatcaccgcagcaggatactgacccgcaatactgttgcgcttctgtgccaggtaatcatgtttagccgggcgattttcccggaagcgcaggttaccctgtttaaaatgttcaatgactgcatctggagtcataccgtcacgttcctctttgctcagtgatgcggcgaaagagatagttggtaccgataaggccgccagcccggtgacagacaaagcagatactgcaagagtttgtttcagtattgcacgtcgtgaaggttgtgctggttggttttgttccattatttgctcctatttactgagttaactccaattgctgcgattatacgtaggtaaacgttaatcaaaccaaaacgacaatttttaaccagtatgaataaatatctgagaccagtcgaactggaaaatagaatgctggcagtcggtttgccgatatgacgaagttgacttgcagttattgtgagcccggtggaatggattgcgagccgggcaggataaatgcgagcccattgtcacttaatgtgagccggtggcatttttcatttgcagttaatgtgagccgaaatttgcgctgattgcgagtcggggggatttcgattgcgagccgctacaactaggaactctgtgtgttccgaacttcataagtctggagcgttcatctcattctttgagtgtccgtttggtaattccggttgtcgcgtcacagttatgatacggagaaatcaggtgtggctctcagtctggtctggcttgaacgtggccatcccagagccagtgctgttgctgatgtactttcagccgcaggctttcctgatttcgggaagtagctccagcaactggccaaagaaccttcgcaacgttgaataagcctgatttattttcactgacttatgtgattaatgctaatgtacgcatacattagcattaatcatgcatttaatcccctgcgcctttctgtctgttctgatttttctggtagtcctgcttcactctcccgatattcttcagaactgtctgccagtggtcctctgcctgctgccggtagcgttcggcaacggcagcaataatgtcaggatcactgtcatggctgcggtgcatgcgtcccttctggccaaagatatcaacaataatattctggctgccctgcctgtcgaaaagatgagcgcacaggcgctttacaaccagcggagtatagtccagcccggcctcatcagcgatctggaagaagaagtacagcatctcatacgttttgtagcgcttgacggccgcactgagtctggctgcccgttgtggtgcttcccaggtgtcatccctgtagttacacagttctgcctggtagtcggattccaggtcttcctctgtataccggtggtggcggaaaaagtattccctggcccgtttgacgactgattcatcctgcggcatgtctgtctctggttaatgctaacgtatgcgtacattagcattaacaccagtacctggcaaggagagtggcgtgcatcgtacctgtggtgcatcccgcccgggctccggacatgctgtgccagcaattcgaccggcggtgcgctgtcctggtgccctttttcgctaccctgtcacgtctttaatttgtttgttagttagtttatttgttggtttgtttgtgtataatataagcatacccctttatgcggagactgacagatgcgtccggcgacatacgaaccagaacagattattgaagcagggctggccctgcaggctgaaggacggaatatcaccgggttcgcactacgtaaccaggtgggtggcggcaatccgacacgtctccgccagatatgggacgaataccaggcttcacagagcacggtcgtcactgaacccgttgccgagctgccagtggaagtggctgaagaagtgaaggccgtctccgccgcgctgtccgaacgcatcacccagctggcgacagaactgaatgacaaggcggtccgggctgcagaacgccgggttgcggaagtcacgcgtgctgccggtgaacagaccgcacaggcagagcgggagctggccgacgccgcgcagacagtcgacgacctggaagaaaaactggatgaactgcaggacagatatgacagtttgacgctggcgctggagtcagaacgttcactgcgtcagcagcatgatgtggagatggcccagctgaaagagcgtcttgcggccgctgaagagaatacccgtcagcgagaggaacggtatcaggagcagaagacagtgctgcaggatgcgcttaatgcggagcaggcacagcacaaaaacacgcgggaagacctgcagaaacgactggagcaaatttctgccgaagctaatgcgcgtacagaagaactgaagtctgaacgcgataaagtcaatactctccttacccgccttgaatcgcaggaaaatgcgctggcctcagaacgtcagcagcatctggccacccgcgaaacgctgcagcaacgcctcgagcaggccatcgctgacacgcaggcgcgcgccggtgagattgcacttgaacgtgacagagtcagcagcctcaccgcaaggctggaatcgcaggaaaaggcctcctcggagcaactggtgcgtatgggcagtgaaatagccagtctgacagagcgttgcacacagctggaaaaccagcgtgatgatgcccgtctggagacgatgggggagaaagaaacggtcgcggcactgcgtggtgaggctgaagccctgaagcgtcagaaccagtcactgatggcggcgctttcaggcaataaacagaccggtggccagaatgcgtgatgatgacaattcagacgcctgtgatgaagcgccccgggcggaggataaatgctacaccaaagggcggcttcgggatgagttcaggatgaagccagcccctggtgcggaaccggtcagaatgtacaaaagtccttacggcgggaaatacggcgtatggcggctggctgactgcgtcccgatgcgggcgaaacgccctcagacagaaaaacagcggctggccagcacacgtctgggcctgcaggcccggatgaagagtgagcgtggcaggttcgccatgctggcacatacctggttagcactgggccccgtcttcctcgataccgaaacgaccggacttgatgccggcgcgcaggcgctggaaatcggtctggtgaatgcccgcggtgagaggatatttgagacccgcctgaaacccacagtcggcatcgatccggcagcagctgcagtacaaatcgttacggaaccatatcgctttccggtgctgtcagtcaggctggcctgagctggatcggggtggctcattccgccgtcactgacgccgttatgacagcacaggtggtaaacaatattgccggatactggcatgaactccagtgtgaaatgaatgatgacgcagggagtgagccagcataacgctgctctctggctggtcagacagttgcagggattaattcaggagtctgaaatggagaatatgttgaaaactatgcgtgagcatttccccgttcgaacagtggtgatcgaacagtctctggatatgtttggtgtcaaacgaaatgaggacgggacgttactcttcccccgtcactccgataaacgttttcccgttgcacgtatccgtaagcgactggcggcttatggctggcgaggagaacgcctgaataaggaggtggcgcgaatcgtcgcgggccctgatatcctccctgagaggagggactacagcattattttcccttacggatgggagaagaagcagctgacgcgtgagatgcggcgaatgtttctccgtaagacgggctgacgtgtgctgattatgcctgatgaattacatcatttttctgacttgcgggagaagccgtgacattgacagaaaaatcaggtcatctggcgtggtgtgccctggtggcgcttgcgctggccaggcaggatggtggcgttctctcgccggcacaggaaaacctctttctcacccgctggctggcgactgcgctgaagcaacggcgtttttctcgtgatgtgacgcccgatatcgagtggcttttgaaacagggacgtcagatgggcgtcagcgccaagctggccagcaagctgaattacctctggcgttcatgcaccggtgagttgtccgagcagaacgacctgttccggctgacgtatgctctggaaacagcgaaagatatgcactggaactaccgtctgctgagcgatcgggaatggtccggccggaatgctgtggcgctcagtgcaggcgtgaacggcatttatctctcacgggccaaactcgatgtcggttttaacgacagcggccgacagataaattcgctgacagcacgtttgacagggaacgtagcgggggtaatgaagctgtttgatcgctgtggctggcagagcctgatgcctccctgccccaccagtattcgctgatggccgggcagggagtgccagaaaagggggattagtggcggatctgcgctaggtcgtcttcagtcagaccggtcattttcatgacggtattgcggtcaatgcagttctggagcatggtacgggctattttcagagtcgcttcgcgctccccttctgaacggcctttttcgataccacgttgttcaccgagctgaatccccttctcgatgcccttctgttcgagctgttgtgcgatggtcataagtgcgtctccgtgttgcggcacacgctgtgccagttcgcgtacaaaggcttcggcgtccgatgtttcgcctgcctgcactatatagtgtaccagcgatattacctgcgatgaagacagatatccggccagcaaaatgggcgccagccggtcaaccaattctgccaggtcccgctgatgaatatgtttctgcaataaagtcagggcggccatgctacggtggccggcgatttcatcatccggaatgaccgtaacgtctaccagcgggaaagcactgctgtagagtttgtctgccagagccgtatcgtcaaattcgtccagccagcgggtggagtatggatacgggctgcgtttccccgtatagaacaacactggtatcaccagtggcagttttttatgccctgcctccaggtggcgctgcatggcggccaccgcatagcgtatcaggcggaaagccatatgtttgtcaggtgttgactggtgttcaaccaggacatgaatatatccgtcgccggctgtggttttcaggctgtagaggacgtcgctgaaatactggcggagatcatcctcaacaaacgagccggattccagtttcagtgtactgagatcgcagatggcacgcagctctgccggcagatgcagctccataaaatcccgggcaatgtcaggttgtgtcagaaactgccggaatgtcgcgtcgtggggagtcggcgtagtgtttttctttttcatcagtccatgctctgaaaaatgacccggtcatagtatcacaggcaaaaaatgttgacattgcgaggaacggaattgcaattccttcaggggcagtcccctctttcttttttaatcatcagcttgcttgcccggagatatccatgtcctggcagaaactggtactgctgaactataccctaatgtgcctggctgacgcgccccttgggcttgtccaacccttcgcctgctcagatgcaagctctgaacagactcacggtttgcgctgtgggttaacaaaatgattgtggatgtagtgccctcttctccatttaatcttcggtgcctcctgtgagagcaaaatcaaaatattatgatttatttcttgcaacatgattctttttgttcaaaatgacaaaaaacatcatgaggtgataaatggaaaatattgagcagttacggaaagtcgccacacgtgcaggtaaacttctgacatccttgagcgaaagtatccgccagcaaaaagaggaattgaagcttaccgagttctatcaggaatacagcaaagccgccctatataagctgcctaagctcagcaaagggagtgttgagtatgctgtggccgaaatggaagccagtggctacatttttaaaaagaaaccttctggcaataccatgaagtacgcgatgacgattcagaacgttatcgatctgtatttccatcgtaaagtgcccaagtacagagatcgcttcgataaagctttcactatatttgtatgtaaccttaaaggtggcggttccaagacagtttctaccgcttcattatcccatgcatttcgggctcatcctcagcttctgttcgaagacctgcgtatcctggccatcgatttcgatccgcaggcatctctgacaatgttcctgagccatgagaattcagtgggcctggttgaaaatacggctgctcaggccatgctccagaacgtgtctcgtgaagaattactttccgatttcatcgtgtcgtcaattatcccgggcgttgatgttattcccgcttccattgacgatgcattccttgctgaaggctggaagggattgtgtgaggaacatctgccagggcaaaatattcatgcagtgcttaaagagaacattatcgacaagctccggtatgactacgactttatcttccttgatagtggtcctcacctcgatgcgttcctgaaaaactgcatcggagcggcagacctgatgttgactccacttcctccggcaacggttgattttcattcttccctgaagtttgtagccagccttcctgcgcttattgattcgatcgaacaggatggacacacctgcaatctcatcgggaatgtaggttttatgtccaaaatcctgaacaagtctgatcacaaaatttgccatagtcaggccaaagaagtattcggtgccgatatgctcgacatggttctgccgaggctggatggcttcgagcgatgcggggagacttttgacacagttatttccgcaaatccagcaacctatgatggaagcaccgaggcgcttaaaagcgcaaaatcagcagcggaagactttgcgaaggccgtatttgatcgcattgagttcattcgtactaatggaggtatgtgatgtcgaatgagagaagaaaaactattggcagacagttaaatacccaggcgtcaatggttgagatgactgacacccaaagaagtcaggtatttaccctaaaaaccggcaggaagataacgttcaggtttgttcgggtacctgcatcggacgttgaaagtaagacattcgtaaaccaggaaaccaacggaagagatcaacttgctctgaccagggagtccctgaaatctattatccagacgattaagtttcagcagttcttcccctgtattggcattcagcaaggtgaaaggattgagatactggatggttcaagacggcgagcctcagcgatttatatccgtacaggccttgatgtaatggttaccaatgaacttttatcagctgatgaagctcgccatctggctaaagatatccagacagctaaagagcataaccttcgggagatcggcttaagattgatggctctgaaagagtctggattcaatcaaaaggaaattgctgaactggaggggttatcccaggctaaggtcaccagggcactgcaggcggcagcagtaccgcaagaattgatttctctgttcccggttcagtctgagctgtcgtttagtgactataaaattctgttagaggttaatgaaaaactcagtgaaaagggtttaacgtctgaagggctcattcagtctgtctcagatcagcatgatgcaattttgagtgactacgagcgaccagacgacgaacagaaatccagtatactgaaattgatttctcaggcctctcaggcattgatagctccgcctcctaaggaaaagtcagtaatttccgcactctggacctttgaagaaaaggacaagttcgcgcgcaagcgtgtgaaagggcgtacgctaacttatgagtttagtcgtatgtcaaaagtggttcaggatgaactggacaaagctatcaacgaggtccttgagagaaatttgagtcaataatttcgccacggcgatttcacatctaacttattgtaattaagtaatttatattgagaatttcaaggtgaaatcgccacaatttcaagtcaatttcgctgcaggaatatctgcccaacgtgtcgtataagctggcgaaagtagttcccttttcatctgccactcgggggcaatcccccgaccggcgaaccatattttccccttgcccggatggttaatcccatccaggacttgcatcagctgctcgctccgttcccgcggctgtacttcatcaaacaaattaagctgcgataccccggttggcgtgaaatcgttcagcatacagcctgcctttgcgtaacggtgaccatccacccagatcctgtccagagctctgacggcagcggcaatgatgtcccgtgtatcctgcgtggggatgagcagtttttcactggccagattaccgtagtagggctcagttacggcgaacggcgatgttttcacaaacacggcaatatgcctgcagaactgccgttccccacgcagcttttcggcggcacgttcagcgtgctgacagactgcctgccgcatcgcttcataagtcgtgactcgttctccaaagcttctgctgcagactatctgctgtttggggggcggtgcttcctccagggaaatacagctttctccattgagttcccggaccgttctctccagaaccacattaaagtttttcctgatgaacgttggattcgcgcgggccagctgcagtgctgtggtgatccccattgtgttcagcttctttgagatcctgcggcccacaccccagatttcctccaccggttgcagtgacagcagtttctccgttcgtttctgattgtgtaacgtcagggcaagcacgcctccgaactgtgaccattctttcgatgcccattgcgcgcttttagccagcgttttggtcggtcccattccgacgccgatggtcagccctgtgccggaacgaacgtgctcacgcagctgtcggccgaaatcctcgaaatcgatgcaactgtctataccgcgaatatccagaaacatctcgtcaatggagtactgctcaacgcgtggcgccagctcttccaggtgaaccatgaccctgttcgacattgatgcgtagagggcgtaattactggagaacgcgataaccggctccggaaatttcgccgacctcagttgaaaccacggcacccccatttttatgcccagtttttttgcttcagcgctgcgcgcgattacacaaccatcgttgttactcaggaccaccacagacctgtcacgcaaatcggggcgaaagaccttttcgcaactggcatagaacgagttgacgtcagccaaagcgaacatcagtctgtgctccgggttttgtgtataaaagccgtcaccaccccgaaaatctgcagttcttccggataaagcgtggggtaggccggattaatcggcagcagggcgatacggggcttcaactgcaggcgcttaacggtgaactcgccatctgtttccgcgatgacaatatccccctgcatgggtttctcagctttgtcgacaaccattaaatcgccggaatgcagacccatttctttcatcgaatccccgatagccctgacgaagaatgttgcagccggacgccgtatacagtaggcattcagatccagttcctcctctgtgtaatcggcggccggcgacggaaaccccgccgggcaacgttcggtgaacagcggggcagtggactgtaccggctcctgttcgggtgctacaagcagtaacatggcatacctcttaaaatgcctgtttttatatacagcattatttaagatattttctgtcctgcaagtgaaattttactgtttcccctcagataactgttctgcctggaaaaacagatgtcaggttatccacagaatcagttaataaccctgtggaggagcaacgcagaactgttggtatgtcatctgtcctcctctggtgtttcccttcagctcctgttgtcaccccggccattcctgcacacctgatgctgactgccacccgctgccagtgtgccgcgtccggcctgtcacgggacgggcgctggcgtcgttgtgattgtactccataccctcgccagtttaagggcgcccttcaagccgctttcgcggcataagctcgccgacgatgagaattgtcggctcgttattccacggtcggcgttgacccgttaccggacgcgacgaacaggcagcgtgcggcagggaacggtatcgcggtgatgcctcctgccggatgttgaggaaaatcttatgttcagagtgacctgtatcgacctggaaaatggcgagtttgcgctttatatcaacggacattatctgtccagtgaagacggcagcggcgagaagctgtacctgggggatattctggaacgtttatcccgtctgcctggtgtgaccacggaaaccgtggagcgaccagtaccagacagtgatgagtggagctggaacgatgtggcagacagtgtttttccggcctgtatcacgctgtcccgcaatatgacagtcgctgcgtttaaacagcgtctttcccggtttcctgatgatgcgctgtgctgcggtacgttctggctggccagtgattttctggcgctggacagttcgctcacggaagacgatatcgatgcggcgatggagctggcacagcactgccatgatgcgaatgacgggttcaactggagccatctgcaatgggcaatcgatgaggtgaagcgcggtggataataattcaaacattaatgatacctggcttgttggcctgagtgtcgacgtcaatggcactgaaatgatggtgcattacctggtttccgcgactgacctggagcatgccgaagcgggtgttctgcaaatggggcgcacctggtggccatcgttgaaacgcgaggatgaccggcatcggtgggaatatgaaacaggcgtggtctggtttaacagcatcattctgctcgatgacgtggaaaacagtatcctgcgtggtctgaagttcctcgatgcgtggacagtgaccggctcaacggatgcgccggtactgcgcgatgagtgggggaatgactggcgggatatcacccgctgataatctgccgggcagtacgtctgcctggtacttcctgaatgaataatgatgtcgcgcagctcctcttttttcggcgccagcgccggcggcgcgggagcaacgctgcctgtggtcagtatcccgcgtccggccgggcacgggacgggcgatttttctgctcctgccgggcgctgtcgctattatgcgcccggcactcgccttctgatgaacgcccttcaagccgctttcgcggcataaactcaccgacggtgaggactgtcggctcgttattccacggtcggcctgacccgttaccggacgcggtgaacagcccacaggcagcggggaacgggcgtcacagggacgccctcccggtgcctcctgtaaccgcgaggaatctctatgtcccgtttaatcctggggaactgtgtcgatattatgtccggctttccggagcgcgccgtcgatttcattctgaccgacccgccttaccttgtcggattccgtgaccgttccggccgcagtattgccggtgacagaaccgacgagtggctgcaacccgcctgtaaccagatgtaccgcgtactcaaaaaagatgcgctgctggtcagtttctacggctggaaccgcgtggaccgtttcatggcggcctggaaaagtgccggtttcagcgtggtcggacacctggtattcaccaaaaactactcgtcaaaatccgcgtatgtcggctaccgccatgaatgcgcttacgtgctggcgaaaggccgtccggccctgccacagaacccgctgccggatgtcctcggctggaagtattccggcaatcgccaccacccgacggaaaagcccgttaccagcctgcaaccgctgattgagtctttcacacacacgaacgccattgttctcgacccgtttgccggctccgcctccacctgcgttgccgcgttacaggcggggcgcagatatatcggtatcgagctgatggagcagtaccacaaagccgggattgagcgcctgacagccgtacagcgcgccatgcaacgcccggccgccaacgacgtcttttatccggaggccgcgtaatgaactattccggacacgaaaaactccgcgcagaagtggcggcgctggccaacagcatgtgcgacctgcgcgccaccctgaaagtgctggaagagcgttatcactggcagcgtcacggacttactgaacgactggccgggcagagtctgcggcgtatcaacaccctgctggatgaagcgtacaacgaaagcctgatgctcaatgagtgttttaaagactgacagatgacgagaccacgggcggcggtgccgccccactgaaccaacggagaaaatcatgatgtatggcacacgtaaagaactgaactcaaagctgaaacgcatgtttggcaacgacgagcgttttgccctgctgatctggacgaagcaggacgttatgtcactgactcaggcgatgaccgaagtggaggccgatgcgattttgcgtgagattggccgaaaaggtatgggcgaacataccggagacggtatttcagacagcacggtacaggcgctgtacgccggattacggactgaaatcccgaccgtcagtgttcccgccgacctgctggcaagggtgacgaatatcgccgggcgggcgctggatacggaggacgctcaggcctggcctcttgtatgtcaggagtaccccggcgttgccgacgctcaggtcgatattgcgcggctcaggcaactggcgctggcggcgtaacgtaccaccccgtaccgggtgacgggcggggtatcaatcacaactgtatgaacacgaagaggaacaacacaatgagaaacacgctcagtacgctgatagtgcgccacggagataatctgttacgccggtccggctggcccgaaaccgtcggcgtgacgcaggtggcccccggtgtggtgcccggctggctggccgtctgcggtgtgctcagtgctgccgaaatcttggcactgacgacgcatctttgtcagccccttaattatggacgggcgcaactgctgacggccagtgcgcagcggctggcggggacgccagtccggttacatctgtacccggtacaggcatatccgcaccctgccacggtacgcgaatgcactgaaattcgccttccgtatgctcaggagtggctgaccacggacgaatatgccgacctgctggcgttcctgaaagcgtccgctgaccgggtatgtgaaattgtccgccaggatacgaagcgcatcgcggcggcgctggcaccgtccggcgagtcccgcctgatggaaaaacgcatcgggaactggcggttactggccgatgaatacgaccatgataactggcttgacgaagaggacgaggacggactggataaggtgctggacgcggtactggtacgtaacgcccgtttctgcccggtgctgctgacgctggttaatgagccggaggaagaaatcgaagccgccggcgtgataaccgactgtttgcgcttcccgggggaaccgaaccgccgctggcttgaccgccgcgtgctccgggatgtggtgaacgaagcccggagtttcacaggcaacatccgttaaataagctgtgtgcggtgaacgataagctgtaaacggtaacgagaaagaaaagagaaggggaggtctccttctcttttttcagtttttcagccggcgactgcgacgatgccggggacgacaggcaaaacaggcaaaaggatgtcgccttttcggctccgcattcacccggctcaggcctgccggccgtcgccttgtggttttccactctgacagtcctgtgtcgtgtgcgggctgtgccgtgcatccatcgtagtcgggctgtcgtggatacaagggtaaagtgcacgcggcggtcacccggtccttccttcacgtcagccgcgatcttccggtcgttcgaccgttcaggtttcacggtctcacccttcagctcccgtcttccgtgcgcgtcaggctgcggcttcccttgcgcccttgcatccacgattgatcgcccgactggtatggatgcacggcaccgcccggtgtcgcggaatatgtgattacggaggttttatgcagtattcaaatcagcaacgtgcgcgtgttattaacgttgaagaatccgaccgcctgtctttcctgccgtacatgttcggcaacgattttatgctggctgaattacagttatatgccctggcgaaaaaatggatgcctgaatacaacggtggtttctggcattttatccgtctgccggaaggcggcggatacatgatgcccgactgcgatcgggtacacatgatcaacggtgaaaactggtttgatcgtaccgtcagcgccgacgctgccggaattattctgacttcgctcgccattaaccgccgttgctggacgcatcacgactgcggcaacgctgcgctcactcgcctgtatatgctgcgtgatacccagctctggaatcacattacgtttcaccctgaatgcaacgctatttacgccgcgctcgactgattaaccgacggggcggcgatgccgccccgctgtaactgtcattcattgatttaagaggagtctgttatgtacggaaccgtcagcaccatctgctgcgacttactgaaagtgtatgagaatcacgaaaaaatcgctgtcatcatctggtgtgaaggcgatgtgcgggaaatgggggcggagtttaatccgaccgctgatgacatacaggccgtactgcgcgccattggcgagtcggacagtgatgcgctctggcgtgatggtattggccagaattttgttgagggtgtattacgcgagttagtcgcactgcgcccaccgcgccagattgctgtacctgaagatgtgctgcgcacgcttttacccctgatggaagccggaatgaaccttcctcgttaccagacgcaggacagggctgctgaagaagaaaccgcgctggatacgttgcgatacctgctttccacaaatatcccggcgcataacctgaccgaaggaaactactgacagatattagtgcgccgtgtacaccggtggtcacttcctcttacagggcggaaaaagcagtcaggcatgatggcaggcggggagggcgcctgtcagcccgcgcgaaaaaacctgcaggctggcgcctgcggggggaaggacaggggccgcgcttcgcgccgctccctgcccttttccccctctgcctctgatggcgtacacttacagccggtttccatttctgtcggaggatgtgatgtccggactgaatctggcggcaacaactaaagaagagcaggataaagtggccattgacctggttgcttcaggcgtggtctataaagaaaggctggcgatgccggtggtcgctgagcttgtcgtcagagaacagcctgagcatttgagagagtatttccgggcgcggctggagtatttgcgcaactcccggacaagaatgccccggaatatgccagaaaagaggatgaggttaaaaaatagcgccattcctgatgcattctgcctgtcgctggccggattttacgcatgccgggtgatgtttttttctggccggggtgtgtgattttcttcctgccggtgataatacgctgcctgttcctgttcctgttcctgttcctgttcctgttcctgttcattctgctgctgatattccctgacagatttcgctgacgccgggcgacttccctgacgggaaccgggactgtcatgctgcgcaccgagccagctgcgctgtctctgcccggccccttcggggcagcgggtttccatcccactgtcgcaacgtcaacggcaggcttgctgcgaccgttccggtcacgccgcccctggcgcgccgtttcctgcgcttttcgcaccccggcggtaaggctgccgggctgtaaggcgcaacgccgtttcgcgtgccgcgtcccgacgttgcggcgggttcctgctcatctccgcttctggtgccgttacccgtttaagtccctgtcgccgggggctgatacagccacaacccgccgcactggctgtccaaggtgaaatgaacagcccacaaaactttttgccgtaaaaggccggcaaaaacttttgcgttctgccccggacaggtgcgtcgggccgtggcagtgatgccccttgcggcgaaggttctcaaacgggtgatggcagtaccagagggaacagaacagcaggtccccgcaaaacgtcaaaaccgcggctcccgaaactcaacgggtgatggtttttaaagtcaaaacaacgcattaaggagatttatcatggcagcacgtggcgtaaacaaagttattctggtcggtcatatcgggcaggacccggaagtacgttacatgcccaacgggggcgcggtggcaaatcttaccctcgccacgtcagaaacatggcgtgtcaggcaggacggggagatgcgcgaacacaccgaatggcaccgtgttgtcgtgtttggcaagctcgctgaaattgccagtgaatatctgcgtaaaggtgctcaggtctacatcgagggccagttacgcacccgcaaatggaccgatcagtccggtcaggacaaatacaccaccgaagtgatcgttaacgtgggcggcaccatgcagatgctcggtcgccacaacagccagccacagcaggagcctcagaccccacctacggcggcaaagggagaaggcaaagcggtaaaaggggcgggaaatgcagcaaaagggaaaaacgcagcagcaccgcagcagccgccagcgcaacccgatccggcgtatgacttcgacgatgatattcccttttgactcggtaaattttcactgatgccccgtctgacggggcttatccaggagaacacgatgacagacaacatcatgagcccactgaaatccctgcctgatggcacgttcacccacgaacaggccgaagcggtggcagcacagtatcagaatgtcgccattgaagacgatcaggggacgcaccttcgcttggttgtgcgtaaggacggcgaaatggtctggcggggctggaattttgaaccgggcggcgagtactggctcaaccgctgtatcgaaagccacggtatccgtaaaacgcagtaagccgtaagaggtgccggacgggaacacgtccggcagacaattattaatatcatgaaggagtatcaataatgtcagttaccaattctaatgcaaaatccgcagtaaaaaccagccgtaaggcgaaaaacgccgccagtgccagtaacaccgtattgtcggcggtgctggcgcagaccgaagaacaacacgtaccgctgtccgcactggtcaaatccccgcagaacgtgcgtatcgtgccgtattccacagagagcgtccgcgaactggcggactctattaaagggattggactgctccagaatctggttgttcacgccctccctgacggcctgtacggtgttgccgctggcggtcgccgtctggcggcgatgaatctgttggccactgagaacacgatccacccggactggcctgtccgcgtgaaggttgtgccggataatctggcgaccgccgcttcactgaccgagaacgggcagcatctggaaatgcaccctgccgaacaaattgcgggattccgcgcgatggcagcggaaggcaaaactcctgcacagactggcgatctgctgggctattcgccccgtcacgtacagcggatgctgaaactcgcggggctggctccggttatcctggaagcgctggctgcggacaaaatcaccacggagcactgtcaggcgctggcgctggaggacaatcccgaccgtcaggtgcaggtgtacgaggcggcgtgtcgagagggctggaacaataaaccggaagtgcgcgtgatccgtaatttgatcaccgacagtcaggtttccaccctcaacaacagcaaatatacgtttgtcggtgaaaaagctttctccggcgatgaaatccgcgcagacctgttcagcgacgaacagggcggttttgtggacaaactggcgctggatacggccctgctggaaaaacttcagtgggtggcggagtgcctgaaagaggccgagggctgggcatggtgcgcgggacggatggagcctgtcagccgctatggtgaggataccgaagtgtaccgtattcaggatgagcctgacgcggtttacacggagcaggaacagcagcgcctggacgagttgcaggaactgtacgacgaaaaccagaccgccagcgatgaaaccgacacgatggagtcagagatagaggccatcgaatgcgcggcacaactccgggcatggacgctggaaatgcgcgcacagtccggcgtggtggtgtcatggcgtcacggtgaaatctgtgtccagcgcggggtgagcctgcgtgagcagtctgaaacggaagatgaacccgatcaggttccggtatatgagcgccagccggagcctgtggacgaaatcagtgttcccctgctgaccagaatgtgtgcagaacggacattgtcggtccaggcggcactgatgcagcagccggaaaaatccctggcgcttctggcatggacgctgtgtctgaacgtgttcagcagcggcgcgtataaccgacccgctcaaatcagcctgaactgtaagcattactccctgacaaaggatgcgccgcccggcgagagcggtgttgcgtttgtgacgctgtcgcaggagggaaaacgtcttgaaacgttgctaccggagggctggacacaggacttcaccacctttttcaccctcagcgccaaagaccttaccgccctgctcagtttctgcaccgcatgcagtcttgacggtatgcagatgcgcggcgccggaggcaccacccgcagtccgctcgataagctggaaatcgcgctcgctttccatctgcgcgactggtggcaaccgacgaaggccgatttcttcactggccttaaaaaaccgcaaatcatcgccgcgctgaatgaggccggactgacaggcgcggcgcgggatgcggagaagatgaagaagggtgatgcggctgaactggcagaggacaaaatgcgtgacaaccgttgggtgcctgtctggatgcgcgcccctgatgcagaaaacgacgtatctgataccgaaaacggcagtgctgatgcagacagccaccacaccctgcccgatgcagcctgataacggaggccgcccttcgggggcggcagcaaggagaaaatgatgcgtaacattattacccccgctgtattgagtacaatgatccccaggaattcgaagactggcgcgacggcggcgaagacctgcgccgtgaactgacccacgccgcgatgcgtgacctgacatgtcccgcaggctgggacatgaacggcgaatatcgcagtgagtttggtggttttttcccggtgcagatccgtttcacgccatcccgcggcaatttcagcctggcggtatgcagtcccggggatatcagcccgtcctggatggtggtctttattccggtcagcggtcgcccgttctctgttatccgcacgctgccagcctggtcgccggaggttatcacgcatacactcagcctggtggctcaccttgatgccgatggttacagtcaggccagcatcatcagcgttctggcgatggagggcgcagcatgatccactcttcacacgccctggttaccctgaagccagcccgtcaggcggcattacaggccattctgacggtggaagaatcccgccgccgtggagcacgtctgcccgccctgccacatgcgcgtacttttttgcgcgtgctgagcggcagcagccggattaacacgacagtggcacagcgtattcccggtctgaactgggagccgaagaaccggctgaccagcctgaaacaggtggaagaggcgctggatcgcctcatctccagtcacggggagtattgcccgctaccactctccgtggatgtgcaggccgaactgttcccggaggtgatacacgcgcgcacagatcgccggatgcagcgtgagaaaatcgcctttaaccgcaaaatgcgccgggaggaaaaagcgctggaacatgcctggctgctgcgccagaacctgctggggcaggccatgacggagcttaactttcagtcgccggaaaccgtcaatgcctggtatacgcgctgggctgacgagtttgacgcgcgggagctggcgcaggggttctggcagtggcggacgcggtttacctcgctgacgtcgctggactggctgcgcgacagtgatgagccgctgtacaacgtgatgtatgaaatctggttcatcgtccgggaaaacccggtatatgtgcgcgaggccgaacgttggcaggtacccaacaagctgacgaaccggaggcccgggcgacttccctgataaagcccgtctggaaacgcagaccgcccggctgatggatcagctggaggtacaaatccggctcatcccggtggcaacgccgccattgcagcaaaaagtggatgaaatagcacatatgcttcacctgatggcgcagtttgccggaactgaactcaggaagtgacccggatggcggggaatatccccgccccgttatcgaaaggagatatcatgcgtaactttgaatctactgaaagatggtggaaaaaatgaaaagccagctggtagccgctgctgatcgtgcggccatgagtgtcgcgtatggtcaggaagccgcagatcattacggtattcagtatggttttatccggtctgtacgtgactggatcaccggcttcaccgaggggattaaaggggagcgttgttgaataacacccgcttttgttacttgagtgttaacggaaatggcggtgtctccggtcactgctttttcttcagaattttttcattaattatataaggaatacgttatgagactcgcttcccgttttggtagacagaattccattcgtcgtgagagtcctttggctgacgctgaattaatgcagactgtgccttcagttttttccggagacaaacatgaatcccggagcgaacgttatacttatattccaaccattaatatcatcaacaggttacgtgaggaaggttttcagtcgttctttgcctgccagagtcgtgtacgtgatttaagtcgccgggaatacagtaaacatatgctgcgttttcgtcgtgaatgacagattaatgggaaagaggttccggaaattattttgctcaattctcatgacggttcgtcaagttatcagatggttcccgggctgttcagatttatctgtacaaatggactggtatgcggatcattttggtgaaatacgtgtgccacacaagggagatattgttgggcaggtgattgagggggattatgaggttatggggatcttcgataaagccaccgaaaatatggagtcaatgaagtcagtgatacttaatcaggatgagcaatatctgtttggtaaagcggcactgactgtcagatatgaggacgaaaataaaatccctgtttctcctgaataaataattactccacgtcgtcgggaagataaacaaaatgacctgtggacaacatatcagcgtgtacagaagaatatgatgaagagtgggttacccggcaggaatgccccggaaaaaacacccggatcagggcagttaccggtattaatggtgatatccggttaaacaaggcgctgtggatgattgctgaacagtttcgtgaatgtaagtcataataacataagtaaagccccgaaaatttttcggggctttacttatgttattcttcccggacattgtcagattgtctgtaacatcccattttaatcaacagacttcatcgttttctgtcatttatgtgccagcgataaaaacggatctgacagggtggaagaagatatgataacgggttcccgtttcgcgggattccgggcagtcagtattacatttctgtgtttattccattctgctatgcggcataaaaaatatatgggtttcggttgataatattatcccttcttctgcttgccggatacaaaaaggggatcatcgggcgggagtctgcctggttttactttgttttatcgcgatccagattcggtgtacatcagtcgcatagtccagacgacgtgcatcctgaaggggagtctttttaaatccggcgttgtacgctccgactgctgtccaggataccccccactttctgaatgcgattgccagataataagctccggtgtaaatattcaggcagggatcggagacaagttgttccggttttattccataacgagccagttcgttaaagtgctgagagtcaacctgcattaaccccgagccatatcccgtaaccggattaataccgacggcattagcccggttacgggattccttccatgaaatcgcccgcagtaaatccggatctattttatagtctctcccggccagatcaaaacagtcagcggcatggactaccgtgctcattaataccaggaggacagacaggagccatttatacattaatttgcctcttgcgtagtcatccggtaataacttaacccactccaactccatactcaacaaatttgccgtcctcaccaccaaaagcaccacaccccacgcaaaattaaaatttttctgatttgtttttagtaacagtgagttatgttcataataatgtaatttaatttattttaatgtattaaatagcggtgcaggcacgtcgccggcaccgctatgacgacgctatacaggggtagtactgactatttttataaaaaacattgcattatatcaggggcgctgctagcgtcgctgtgcctgtttttaagtaacacccctgggggcgctgccaggggtgttaccccttacagagtgctcctgaatccggagtttataatgttcttattcgttgcggaaaaaaggtgatagtgaatggctaaagtcaatgtatatataagtaatgaggtacacaataaaataactgctattgtggaaaaacgacgccaggaaggggcgagagataaagatatcagtttttctggtacatcttcgatgttgctggaattagggcttcgtgtctatgaggcacaaatggagcgtaaggagtcgccatttaatcagacagaattcaataaagtattacttgaaaatgtacttaaaacacagtcatccgtagccaaaattttaggtataggatctctcagccctcatgtcgccggaaatccaaaatttgaatatgcaaatatggttgaagatatcaaagaaaaagtatcttcagagatggaaagatttttccatgaaaatgaagaataatagcgggattaaatcctgatttagtttaaataaaagtatgttgatctataaaaatatagtgacaaattaaggctgaaaacaatatagtgtctttgtagttaacgctacgttaaaaaaacaagttaaatcgccgatacagggagctgtcactccctgcatcgactgtccatagaatcctttgaggaggttcctatgtgtccgacggatcgtagagaaagaacactcgccagtcaatctgtaaataaatacattctgagtattcaggatatctataaaaactcaccagtccctgtttgcgtccgtaatcaaagtcggaaaatcatttacgcaaatggagcctttattgaactcttctctaaagaggatcagcctctttcgggagatagttataatcgttatggggttgaagtttttctgtcatccctggaacttgaatgtcagtcgcttggacatggagctgctttttgccggcgttttaattttcatggggaaatttatcagataagaatggagaatatttcattcgataataatgagataattgtgttgtggcagataaatttatttccagatcatccatttttttctcctgacacaaaaactaaaaatttgtctctctcaggaactgaatcattctggaacgaactgtcccccggaactttgcttgttttttctttttatacattaggagttagtcacgcaaatatagctaaagaattaggtattactatcagagcatcagaagacagaatcaaacctgttaagcgtaaaattaaaaggaattatgaatctttcgattcattcagaatatcatgtatttctaaaggtaaaataatatcattgatagacattattcgtgaattttattgtgttaagtgaatgttaattaaggcgcgccatttttggcgtgtttttttttgccgttttccgtgtaatcataagtttattagtcgtgtaagcagaggtgaatttgtgaggaggagaaacgcaagagaggggataagtcgaactgtctcagtgtatctcgatgaagatacgaataaccgtcttatcagggctaaagatcggagtggaagaagtaaaacaatagaagttcagattcgtctgagggatcatctgaaacgatatccggatttctataatgaagaaattttcagggaggtaattgaagaaacagagtccacatttaaagagatttaactttcatattcatagttgatattactcaaaagaggaaccatatgagcgctattttaagtgttcagggtgcttctgcgcccgttaaaaagaaatcgtttctgtctacgttcacacgtctgaacctgctgaaacttgcccgcgcagtgatcccggcggcagtactgatattctttttcccgcaactggcaatggctgccggcggttcgcaggacctgatggccagcggtaacggtacggtcaaggcgacatttggtaaggattccagcgccgtcaagtgggttattctcgcggaagtgctggtcggtgccgtgatgtacatgatgaccaagaacgtcaaattcctggcgggttttgccatcatctcggtctttattgccgttggtatggctgtcgtcggcctctgacaggaaataagaccatgtcgggagacgagaataaactcaggaaatatcgtttcccggaaacactgaccaaccagagccgctggtttggcctgccggtggatgaattaattcctgctgctgtctgtattggctggggattaatgacatcaaaacaacttttcggcatcagcgctgcggttctggtttatttcgggataagaaaactgaaaaaagggcggggaagctcctggctgcgtgacctgatttactggtatatgccgacagccctgcttcgcggtatttttcataacgttcccgattcgtgtttccggcagtggattaagtaatcattattccgggatgagtatatggaacacggcgcccgtttaagtaccagccgcgtactggcaataagttttatttttatggccctgctgattgtgctcagtctggccgtgaatgtcattcagggtattaataactaccggctgcagaatgagcaacgcacggcggtcactcctatgggatttaacgcgtcctttgcggtgtcacagaacagtgccgatgcctcttatttacagcagatggcgctgtcgtttattgccctgcgtctgaatgtgtcgtcagaaaccgtcgacgcgtcacaccaggcacttctgcaatatattcgtccgggcgcacagaaccaaatgaaagtcattctggcagaagaagcgagacgaattaaggccgacaacgttaactccgcttttttccagaccagtgtcagggtctggccacagtatggccgcgtggaaattcgcggtgtgctgaaaacctggattggagattcaaaaccgtttaccgacatcaaacattacattcttattctgaaacgggaaaacggcgtgacctggctggataatttcggggaaactgacgatgagaaaaaataagccgtataagccatttttactggcggccggatggttattttccggtctggtgatggcgtcgggttccggtacgctggccccggtggtggtgtccctggctaacggcggtcaggcgaacattgctgtcagcaacaccgacccgaacctgtttacggtaccgggtgaccgtatcactgcggtcagcggtctggacggcatgctgacaaacagtgagcagacaggcacgggcggcgtggtggtggccacggtcagtaaaaagccgttcaccttcattctggagacggagcgcgggctgaacttttccgtccgggccgtcccccgggccggtgccggacgcaccgtacaactggtcagcgacctgcgcggaaccggggaggaggctggcgcatgggaaacggccaccccttatgaatccctgctggttgccgtcagccaggcagttcgtggaggcacgctgcctgccggctggtatcagatccccgtcacgaaagaagcgctgcaggccccggccggtctgtctgcacgggctgacgctgtgtggaccggcaatcacctgaaactggtacggtttgctgtggaaaataaaatgccgtcagccctgaacatcagggaaagtgatttctggcagcccggaacccgcgccgtgatgttcagccagcccgtcagccagatactggccggcgcacgaatggacgtgtacgtcatccgtgacggggagggcaactgatggcgagcatcaatacggttgtaaagcgtaaacagtacatctggctggggattgttgcggtgggggctgccgctgccattggcggaggcctttacctgtctgacgtcgacatgagtggcaacgggacggccgcagagcaggagccggtaccggatatgaccggggtggtggacacgacctttgatgacaaagttcgtcagcatgccaccacggaaatgcaggtgacggcggcgcagatgcagaaacagtacgacgaaatccgccatgagctggatgttctgaataagcagcgcggtgacgaccagcgtcgtattgagaagctggggcaggacaacgccgccctggccgaacaggtgaaggccctgggagcgaacccggtgacgaccacaggagagcccgtgccgcatacacctgtctcaccgcccggtccggaaggagaacctcagccgggtaatacgccgatgaccttcccgccacagggagccgttcctccgccaaccgctttttatccggggaatggcgtcacgcctccgccacaggtgacataccagtccgtgccggtgccgaaccgtatacagcgtaaaacgttcagctatgacgctgccgcgaagaaaggtccctccctgccgtatatcccgtccgggagttttgcaaaaaccatgctgatcgaaggagcggatgccaatgcctccgtcaccggtaatgaatcgacggtccctatgcagttgcgcattaccggcccggtggagatgccgaacagtaaaacatatgacctgacagggtgctttgtgggtctggaagcctggggggatgtgtccagtgaacgcgcgatagtacgtacccgtaatatcagctgcctgaaggacggcaaaaccatcgacatgtcggttaagggacatgtcagcttccgtggaaagaacggcatcaagggtgaagtggtgatgcgtaatggcaaaatcctcggctgggcgtggggcgccggttttgtggacggtatcggccaggggatggagcgggcatcccagcaggcggtggggctgggggccactgcgacttacggcgcgggcgatgtgttcagaatggggattggtggtggtgcatcgaaagcggcacagacactcagtgattattacatcaaacgtgccgagcagtatcacccggtgatcccgattggtgccggtaatgaagtgaccgtggtgtttcaggacggttttcagctgaaaaccgtggaagaaatggcacaggagcaggcccgtcaccggaaggaggatgaaaatgcggaaagcccggtgcctatacctccgtcagtcgacagccatatgaacggctttaacaccgaccagatgctgaagcagctgggtgacctgaatccacagcagtttatgtccggcagccagggaggacatgtaaatgggaaataaccggctgaacaacctgaagggacgtgccgttttatatcgtattgccggtcttctgcgctggctgatatggggcgtgaaatatgccgttatctggccgctggccacaacagccattgttgtcattctgctcttccggacgggggataccacgccgggacaacagatggcgcaggaaatcggacgggtgagggcaatggccccgtccgggatgtttccggtccgggactgccctgacccggctttcacggtgtcgtcacctgtaccgctgaatctgacggaaaactgtccgctaaaaataaccggcgcggaagaatacgcggcagatatcgaccagtccctgtcgcaaacgggatggctgttatgggggatgctggcgctgttgtataccgcggtggcagtaatgatcggagaccggccgtaccgtcacaatccactgacatatgcgtatgacacagcgacaaacaacctgaagtatattgataaagaaaacgaaatccggactttaaaagtaaatacaaacgggcaggtttcttattctggtaataaagaggctaaaaaagagggtgataaaaatgaacatacgtaatgttatttcagttcctgatgaatccgtgcaggatgattttgtgaaatatgttatcagtaactgcactacaaaaataatactctccggtcgccgggaatataatttctcacgacaggaatataatttttcagttaccggaatgcctggcgcagggaaaacatgtgttctgtctgaattaatcaaaaagctgctgcgtgagaataagaaaggggcgaaatcatgaaccggatttcatgcctgatccctttctgtggcgcgcttctgctgtccggatgcgccggaacgaactccgactttgaatgtaccgccaccacgtcagacacctgtatgacgatggagcaggccaatgaaaaagcgaaaagacaggagcaacctgagacggtaaagccgggtgcggtatcactgccgcgcctggctgagggtaactttcgcacgacgccggtacaggtagtcagtaccgtcactctacccgtcgcaaagaccgtggccgccccgcgttccgggcagaaaccgccggcaccacacccgctgtttacggctgcccgggaggtgaaaccggtggcggctgtcagtacggtctctcctgtggtgccgccccgtccactgagaaccagggagcagacggcggcgttatggatagcgccctatattgacagccaggatatttaccatcagccgtccggcgtattttttgtcattaaaccgtccgtgtggggaaagccacggattaattaactgacgcgtcagtcagatatcagccggcaatgccggccggctttctgtattcaaaacctgcctgtaaaacgagtgccctgtgcgtgaaaagggacgggcggtagcgtgtcagaacgtgtcaggagacatattccatgagcgatgaagccgatgaggcatattcagtgacagaacaactgaccgtgacgggaataaaccggatacggcagaaagtaaaccgtaaaggtattccggtttaccggtgtgaagcatgcggtaatcccattccggaggcgcggcgaaaaatatttcctggcgtgacgttgtgtgtcgaatgccagtcttttctggaaaaacagggcaggcattatgcataaatcagacgctgaaaaaatggaatccattattgataaacatgaccggatataccgacgacaggtgcgggtatttaaaaacctgggcttcctctcaataattaccgccgtactgagtgtgattactgcgttattcagtacctccctgctcctgaaatacacgctgtgtgtcgtgatatgcgtttgtctgatttatctggtttttatgttcttctgcctggacaggtatatcgcgctcagtcgtcagacactgctgtggctgttgcgccgggtggaagataccgcagacgttcgccgggagctgctccgccgcctgctgtccgggaaaacgctgaccggacgggatgaagacgacatcctgcgtctctggtgggagagcagtaatgaagtggaggagcttgcaacccgtcagcgtgaacaggatgccatccggaagtttgtcggcggggataaatcagaatgaaggtttatctgcagcgttacggcgtggccggttttctcctggtgtactggagtctttcctttgtgaatgaatatttcctgcataagcatccgctttctgctgaatcctggaagtgaatgagattacaggcgctgctggtaacaggctctattgtggtgaccgtgctgcggctttttctcctgaactccgtggtgcgccgggaggcaacggccatcatgaccggggtcgctgcaggtcttcatgtttttgctctgctggctccttccgtctggttgttttatcagtggcagtggaatggactgtttcttctgcagtggcagggagcagtcttcctgttctgtctgttcgcgcttcccgtttcaacattctgtttttcttaaggttaaggtgttcgtgtgaagaacctgcttgatactgtcactcaggcggccaactcgctgctgaccgcgctgaagctgccggatgaatcggcacaggccaatcagatcctcggcgagatgagcttcccgcagttcagccgtctgctgccgtaccgggactataaccaggagtccggcctgttcatgaatgacgccacgatgggctttatgctggaagccacgcctgtcaacggcgctaacgagaccattgcgctctcccttgaccatctgctgcgtaccaaactgccgcgcgggatacccctgtgtgtccacctgatgtccagccagctggtcggggagcgtattgagtacgggctgcggaagttctcctggtccggtgagcaggcggagcggttcaacgccatcacccgcgcctactacatgaaagccgcagagactcactttccgttaccggaaggaatgaacctgcccctgaccctgcgccattaccgggtgttcatctcatactgcgcgccctccagaaaaaaaagccgggccgatatcctggagatggaaaacctggtgaagattatccgggcttccctgcagggggcatacatcagcacacagaccgttgatgcgaaggcatttattaatattgtcggggagatgattaatcacaatccggaatccatccatccgacccggcgccggctggacccgtattccgacctgaattaccagtgcgtggacgactcctttgacctgaaggtcaggcaggattacctgacgctgggactgcgcgataacgggaaaaacagcaccgcgcgcatcatgagttttcatctggcccgtaacccggaaatcgccttcctgtggaactcggcggataattacagcaatctgctgaacccggagctgtccatctcctgtccgttcattctgacgctgaccctggtggtggaagaccaggtgaagacccacagcgaagcgaacctgaagtacatggatctggagaagaagtcgaagacctcctacgccaaatggttcccgtccgtggagaaggaagcgaaggagtggggagacctgcgccagcgcctggcgtcgaaccagtcctcggtggtgtcctactttttcaatatcacggcgttctgccgcgacaacaaggaaacggcgctggaaacggagcaggatatcctgaacagtttccgtaaaaacggttttgagctgatttcgccgcgctttaaccacatgcgtaatttcctggcctgcctgccctttatggccgggaagggactgtttaagcagctgaaggaagccggtgtggtgcagcgggcggagagcttcaatgtgaccaacctgatgcccctggtggcggataacccgctgacgcccgccgggctgctggctccgacctaccgtaaccagctggcctttattgatattttcttccggggaatgaacaacaccaactacaacatggcggtctgcggaacttccggggcgggcaagaccgggctgatacagccgcttatccgcagcgtgctggattccggcggctttgcagtggtgtttgacatgggggacgggtacaagtccctgtgcgaaaatatgggcggggtgtacctggacggggagaccctgcgttttaaccccttcgccaatatcaccaatattgaccagtcggccgaacgtatccgcgaccagttgtcggtgatggccagccccaacggcaaccttgacgaagtccatgagggcctgttgctgcaggcggtcagggcagcctggctgacaaaaaagaaccgggcgcgtattgatgacgtggtggattttctggaaaacgcccgcacgagcgaacagtatgcggagtcacccggtatccgcagccgcctggatgaaatgattgtcctgctgaaccagtacacggcagcaggcacttacggcagatacttcaactccgatgaaccctccctgcgcgatgatgccaggatggtggtgctggagctgggtggcctggaagaccgcccgtccctgctggttgcggtgatgttttccctgattatctacatcgaaaaccggatgtaccgcacgccgcgtaacctcaaaaagctgaacgtgatcgacgaaggctggcgtctgctggacttcaaaaaccgcaaggtcggggacttcatcgaaaaaggctaccgtactgcccgccgtcacaccggcgcgtatatcaccatcacgcagaatatcgtcgactttgactccgacaaggcgtccagcgccgcccgcgcggcatggggtaactcttcctacaaaattatcctcaaacagagcgccaaagaattcgcgaaatacaaccagctgtatccggatcagttcccgcagctacaccgggagatgattgagaaatttggcgccgcgaaagaccagtggttcagctcgttcctgctgcaggtggaaaaccattcctcctggcaccgtctgtttgtcgacccgctcagccgcgccatgtacagctcggacggtcctgattttgagtttgtacagcagaagcggaaagaggggctgagtattcacgaggcggtctggcagctggcgtggaaaaagtcaggaccggagatggcctcgctggaggcctggctgcaggagcatgagacattcaggggaacttatgagtacaaagcagaaacagactgacggcacgggagcgcgtaagcgtgacgggctgtggatgataccgggatgcctggggatggtggtacttaacgccgccatcagttacgggatagtccggctgaacacgccggtgacggtggcattcaacatgaaacagaccgtggatgcgttttttgacagcgccggccagaaaaaactgacggaagcgcagtcgaaagcgttgtccgggcgctttaatgcggccctggaggccagcctgcaggcgtggcagcgggagcaccatgccgtcattctggtttcaccggcggtggtacagggcgcgccggatatcacccgggagatccagcaggatattgcccggcgtatgagggcagagccgtgaaatggcgggggctgacagccctgctgatatgggggcagagcgtggcggccgcagacctgggcacctggggcgatctgtggccggtgcaggagccggacatgctggcggtgattatgcaccggctggaagccctgcagcagtccggtgagatgggccgccggatggaggcctttaaggagcgggtgatccacaacagcctgcgaccgcctgcggtgccgggtatcgggcgcgcggagaaataccgcagccggctgtttgatccgtcggtcagactggcggccgatatccgggataacgaaggacgggtgtttgcccgtcagggggaggtgatgaatccgctgcagtatgtgccctttaaccagacgctgtatttcattaacggcgatgatccggaacaggtgtcgtggatgaaacgccagacgccgccgacgctggagagcaaaattattctggtgcagggcagtatccctgagatggagaaggcgctggacagccggatttactttgaccagaacggggtgctgtgtcagcgcctcgggatcgaccaggtgccggccagggtgacggccgcaaaagacgggcgtttcctgaaagtggaatttattccggcggaggacggcagaaaatgaaacggtatctgtggctgtgtgtactgattctgctggccggtcatgtccccacggtatcggctgatgcggcctgtgaaagtcgttttgtaaacccgatcacggatatctgctggagctgcatctttccgctgtcgctgggcagtacaaaagtgagtcagggaaagctgccggatacggccaatccctcaatgccgctccagttctgtccggcgccgccgcccatttttaagcgtcccggactggcgattggctactgggagccaatggcgctgacggacgtcacccgctctccgggctgcatggtgaatctggggttcagcctgccggccttcgggaaaacggcacagggtacggcgaagaaggaggataaacaggtgaacggggcgttctaccacgttcactggtacaaatacccgctcacgtactggctgaatatcatcacgtcgatggggtgtctggagggcggtgacctggacattgcgtacctctccgaaatcgaccccacgtggacggacagcagcctgaccagcattctcaatccggaagcggtaatttttgccaatcccatagcccagggggcctgcgcggcagatgccattgccagcaccttcaataaaccgctggatgtcctgttctggtgtgcaggctctcagggctccatgtatccgtttaacggctgggtgagtaacgaatccagtccgctgcagtcctccctgctggtcagtgagcggatggccttcaaactgcaccggcaggggcaaattatggagaccatcgggcagaataccgccgtctgctttgaatatccgtcgcccattctccctaaagagcgctggcgttatcagatggtgaacatgtatccggacagcgggcagtgccacccgttcgggcgcagtgtgatgcgctgggaaaccgggaaaaatccacccaacacgaagaagaactttggctatctgatgtggcgtaagcgcaactgtgtatttctgtaaaccgataccgaagagagggtgtttatgcgaattatttataagagacagcattatctgtccgttatcaggtggggggcggttgctgtcgtgcaggtcctgaatgagagtgtaaaactgtttccgtttgcgctggtgatgtttgcgctgatggctttttattttcttccggaacgcatcatctctgatgttgttaattcgtggatggaaacagacacgaccggaaaaatatcgctcatcagactttacctggaagtgacatttatgctgtccctcgagtcttcttctcttttatttatgtaccggggaaagcgatgcacaggaaaataaaatacctggccggactgattatggtcataagcgggacggtatcagccggcggagtcgctaatacccctgaaaaccgccagttcctgaagcagcaggaggaactgagccggcagttgcgcgaccggcctgatgctgaactgaaagcgtgggcagaccggcagattcaagcgaatcccctggtgcagtcagaccggcatttcctggatgaccttgcccgaaagcagcagacttctcaggcggataaaccggagcagggcgcggtgtactttatctcgttttccattccggaagaggggctgaagcgcatgctgggcgaaacccgtcgctacggtattccggccacgctgcggggaatgcgggataacgacctgaaagccacggcagatgccgttctgtccctggtaaaggatggggcaacagatggtgtgcagattgacccgacgctgttcacgaaatatgacatccgcagcgtaccgactctggtggtgtactgccgacagggatatgacgttatccggggcaatctgcgggtgaagcaggcgctggagaaagtggtcaccgccggggactgcaggcaggtggctgccggattacttgatggtgccggagataaaccgcaatgacattccctgcggaataaacagcaggaaggagatgttatggcgctgaccagaaaacagcgggaaagactgcgtatgaaattcggcggccgctgtgcttactgcggctgtgaactgccggagaaaggatggcatgccgaccacgttcaggcagtgctccgcaaatcagagcggtgcatgaaggcggcagagaaaggcattttcagactgaaatccaccggtgacgttttcaggccggaggccgactgtccggaaaacatcttcccgtcctgtgcgccgtgcaatttgctgaaaacgacatattcgctggagatgttcagaaaacaggtctccctgcaggttgagcgggggcgccggagcagcgttaacttccggacagcagagcgttttgggctgattagtgtggtgaataaaccggttgttttctggtttgagcaatacgagggggagaataaatgaaacgtatgttacctctgtttctgcttctggcagccggccaggcacaggctgacagtaacagtgattatcgtgcgggttcagattttgcccatcagatcaaaggccagggcaccggcagtatccggaattttaatccgcaggagagtatacccggctataacgcgaatccggatgaaacgaaatattacggtggcgtgaccgccggtggtgacagtgggctgaagaatgacggcacgacgcagtgggccacaggcgaaaccggtaaaaccattacagaatcgttcatgaacaagcccaaagatattctgtcaccggatgcgccgtttattgaaaaaggaagggatgtggtgaaccgtgccgacagtattgtgggaaataccgggcagcagtgcagcgcgcaggagattaaccgcagcgaattcacgaattatacctgtgaacgcgacaccactgtggaggaatactgtacccggacggccaccatcaccggcgactggagagagacaacagaggtcagaacctacaccctcaccgcctttagtttcagccgttccggtaagcagatcgttttcagcgtaaccgtgccggaagcgggtacgataagcagcgccagcctgaatgtgatcacacagaattatctgtggaattcccgtgccggctttatgaataccatcttcaacatgacgtggggcagtaccattacactgggtggcgcgacgggaatgatgctgagtaagggccagattctgagcgggacaagctgcagcgggaacggtagctgtaccgggacgctggatgaccgcatttttaacgaactgaccagcgggagaacgacgttcacgctgacactggtgatgcaggtaaaggaccgggagtggataccccgggtggagtgggtggaaagctgcccgtttaataaagcggatggcgtgctgaaaggcacagaatgctcagagccaggtggtacgaaaaccggggtgatggaaggaaaaccctggagcctgacggaggcctgctgggcataccgcgataaatatgtcacccagtctgcggacaatggcacctgccaggcgtatgtggacaatccggcctgtactcttgccacccggcagtgcgcgttttattccggtgagggcacctgcctgcatgagtacgccacgtactcctgtgagtcgaaaacgtcaggaaaggtcatgatttgtggcggggatgtgttctgcctcgatggggaatgcgataaggcgcagagcggaaagagcaatgattttggcgaggcggtatcgcaactggcggcgctggcggcggcaggtaaagatgtcgcggccctgaacggtattgacgtccgtgcattcaccggacaggcgaaattctgtaagaaggccgcagccgggtacagcaactgctgtaaggacagtggctgggggcaggatatcggtctggctaaatgcagtagtgacgaaaaagctctggccaaagcaaaaacgaacaaactgacggtcagtgtcggggaattctgttcgaaaaaggtactgggtgtctgtctggagaagaaacgcagctactgccagtttgattcgaagctggcgcagatagtccagcagcaggggcgcaacggccaactgcatatcagcttcggcagttcaaaacatcctgactgccggggtatcaccgtggacgaactgcagcagattaaattcgaccagctggacctcacgaacttctacgaagacctgatgaataaccagaaaatcccggacagtggcgcgctgacggagaaggtgaaagaacaaattgcagaccaactcaggcaggccgggaaataaggacagtcagatgaagataatgtcttttctggttcgggtggtggtgacgcttattgtgatatccccagcggtgtactggtcatgggatgcggtaagcacaaccacagcggacgatatcatgctggcggtgctcattattgccgcttacggtctgatgttcacgctgctgttctgtttcgtgaatgtactgacgaaactactgcagcatgataatgaatccagttgaaggggggtatgatgcgaaaaatacagaccgtatgggtggcagcgttactctgtggctccctgacggcatacggaaaagatgccggatggcagtggtataacgacccggtaaaattacctgacccaaaaacgacggataaatccgctcaggttcgtcaggagcctgacattatgcagaaattatctgcgctgcagaccgcaacaaagcgggcgctttatgaagccattctgtatcccggtgtggataattttgtgaaatatttccggctgcagaattactggacgcagcaggcggggcttttcagcatgagcgccaaaaaagccatgctggcgcatcctgaactggactataacctgcagtacagccactacaacggcacggtacgtaaccagctggccgcagaccaggctcagcaacggcaggccatatcaaagctggctgaacactacggtatcatgttcttttaccgcgggcaggaccccattgacggccagctggcgcaggtgattaatggctttcgcgccacttacggtctgagcgttatcccggtgaccgtggacggggtgattaacccgatgctgccggatacgcgtcctgaccaggggcaggcgcagcgtcttggtgtgaaatatttcccggccatgatgctggtagacccgaaacagggcagtgtccgtccgttgtcatacgggtttattacgcaggacgacctggcaaaacagttcctgaatgtgtcagaagattttaagccgaatttctaaagtaatatcaggggattgtattactgtcactcgttcgcaggtaaataatgcagatgaagcggctgtctttatgccctttatttttaattcagataaatagcccccactgttaaatagtttattcatggcggcgttttttagctgatgaatattctgttctctgataataaatcaggtatcgcatatattaaataacaatggagtgactccactgtgcgtaaatataaattatcgcttcctttaccggatattactggagtatgggttttctccctgggcgtctggtttcacattgtcgggcggctggtttaccgcaaaccctggatggctttttttctggcggaactgattgccatcattctggtgttgtccggcgcttaccgggtgctggatgcctggatagcccgcgtcagccgggaagagcgtgcgttactggaagcccgtcaggctgccattctggctgctgaaaaagaagaaaagggggataaatcacatgtctctcaataaggctttgctgttcctgttgcttctgatggggacgggggttaatgcctccacgcgggaagagattgaacggctatataacccgcacgggatggccgcaccgtccgggcaaaagcagccagcagatacgcagggcgtgcagaaagtaacgccggcgccccgctggtttcgtctcagcaacggtaaaacggttaacctcgccgactggaaagtggtgttgttcatgcaaagaagctgcccctggtgccaccagtttgacccggtactgaagcaggtggcacagcagtatggattttcggtattcccttataccctggacggacagggggatgccgcgtttccggaggcgctgccggcaccgccggaagtgatgcagaccttcttccccaatattcccgtcgccaccccgacaacatttctggttaacgtgaacacacttgaagcattacctcttttgcagggggccaccgacgccgccggttttatggcccggatggataccgttctgcagatgtacggagaaaaacatgcagggtaaaacgagaattaaaccgcttttcatattatgtacggcgctgatgaccgtcgcacccgccgtctctgccgatgtgaacagcgacatgaaccagttcttcaataagctgggctttgcttccaataccacacagccctccgtctggcagggacaggcggcaggatatgcctccggcggctctttatatgcccggacacaggtaaaaaatgtccagctggtctccatgaccctgccggatatcaatgccggttgcgggggcatcgatgcctatctcggctcattcagtttcattaacggcgagcagctgcagcgttttgtgaagcagattatgagtaacgccgcagggtacttttttgaccttgcgctgcagacgacggtgccggaaatcaaaacggcaaaggattttctgcagaaaatggcctccgacattaacagtatgaacctcagctcctgccaggcggcgcaggggattgtcggggggcttttcccaaaaacacaggtctcccagcagaaggtctgccaggacattgccggtgagagcaatatttttgccgactgggcggcgtcccggcagggatgtactgtgggcgggcaatccgacagcgtcagggataaagccagtgacaaggataaggagcgggtgaccaaaaatatcaacatcatgtggaatgctttgtccaaaaacaggatgtttgacggcaacaaggagctgaaagagttcgtgatgacgctgaccggttcactggtttttggacccaacggcgaaatcatgcccctgcctgccagaaccaccgaccgggctattatccgggcattaatggaaggcggaacggcgaagatataccactgcaatgattcggataaatgcctgaaggtggtggccgacacgccggtgaccatcagtcgcgacaatgcgctcaaatcacagattacgaagctgctgaccagtattcagaacaaggcggtcagcgacactcccctggataataaggaaaaagggtttatctccagcaccaccatcccggttttcaaatacctggttgacccgcagatgctcggcgtgtcaaccagcatgatttatcagctgacggattatatcgggtacgacatcctgctgcagtatatccaggagctgatccagcaggcccgggcgatggtggccacagggaattatgacgaggcggttatcgaacatatcaccgacaacatgaatgacgcgacccggcagatagcgtccttccaggcgcaggtccaggtgcagcaggatgcgctgctggttgtcgaccgtcagatgagctacatgcgccagcagctgtcagcccgcatgctcagccgttaccagaacaactatcattttggcggaggtgcgcagtgaacgaagtctatgtcattgccggcggagaatggctgagtaataacctgaacgccattgcggccttcatgagcacccggacgtgggactccattgagaaaattgcgctgaccctgtccgttctcgcggtgtccgttatgtgggtacagcgacataacgtgatggatctgctgggctgggtggcggtgtttgtgctgatatcacttctggtgaccatacggacatcagtacagataattgataacagcgacctggtgagggtttaccgggtggataatgtgccggtcggactggcactccccctttcgctgacgacccggatcgggcatgcgatggtggccagctatgagatgatttttgcccagccggacagcgtcacctacagcaagacaggtatgctgttcggggcgaatctgattgtgaaaagcaccgatttcctgtcccggaatccggaaatcattaacctgtttcaggactacgtccagaactgtgtgctgggggatatttacctcaatcacaaatattccctggaagaactgatggaatccgatgacccctatacgctgattttttcccgcccaagtccgttgcggggggtttatgacaaaaataatcattttgtcacctgcaaggatgcgtcggtcacgctgaaagacaagctgaatctcgatacaaagacaggaggcaagacctggcattattatgtgcagcagatatttgggggcaggccggaccctgacctgttattcagggaactggtaagtgacagttacagttatttctatggctccagccagtcagccagccagatcatgcgtaagaatgtaacaatgaacgctctgaaagaagggatcaccagtaatgcagcccgtaacggtgataccgccagtctggtgaatctggccaccacatcctcgatggaaaaacaacgtttgtcacatgtctccattggttatgtgacaatgcgaaacctgccgatggtacagactattctgctggggatagccatcgggattttcccgttactggttctggccgctgtctttaataaactgacgctgtcagtgctgaaagggtatgtatttgccctgatgtggctgcagacatggccgttgctgtatgccattctgaacagcgccatggtgttctatgcgaaacagaatggtgccccggtggtgctgtcagaactctctcagatacagctgaaatattccgatctggcatcaaccgcaggttatctctctgccatgattcccccgctgtcgtggatgatggtaaaaggtctgggcgctggattttccagcgtttacagccactttgcgtcttcgtctatcagcccgacggccagtgcggctgccggcgtggtggacggcaattattcctacggcaacatgcagacggagaacgtcaacggcttcagctggagtaccaacagtaccacgtcatttggccagatgacttaccagaccggtagtggggcgaccgccacgcagacccgggacggcaatatggtcatggatgccagcggtgcgcagtccagactgccggtgaatatcaacgcgacccggcagatagcggcggcacagcaggagatggcgcgggaagccagcacgcaggcagaaagcgccctgcatggtttcagcagcagtatcgccagcgcctggaatacgctcagccagttcgggacgaaccggggcagcagcgactcagtgaccagtggtgctgacagcaccatgagcgcgcaggattccataatggccagccggatgcgcagcgcagtggaaagctatgcgaaggcacataatatcagtaatgagcaggccactcaggaacttgcagcgagaagtacgcgaacatctgggggtatttatggtgatgcaagtgcagagtggggcataaggcccaagatattgggggtcggtggtggagctggtgttaaagccggtggtcgtgctggtattgattggagcgatgatgatacgcatcaggccagcagtagttcacgatccagccaggatgttcgtcatggtgttgatgccaaagccacgcaggattttaaggaggccagcgattacttcacgagccgtaaggtcagtgagtccggaagccatacggacaataatgctgattctcgtgtggatcatttgtctgccgccctgaactcagcgaaacagagttatgaccagtacaccacgaacctgacccgcagccatgagtatgctgagatggcgtcccgtacagaaagcatgagtgggcagatgagcgaagatttgtcacagcagtttgtgaattttgtgcaaaagcatgcgccacaggatgcagaaaatattctgacaaataccagctcgccggaggtggcagaacgacgtcgggcaatggcttgggcctttgttcaggagcaggtacagcctggtgtggataatgcctggggcgaagcccgcggtgatattggcagtggtatgagcacagtatccggtggtggtgataaacaggatgtggtagccgatcatcaggcccatcaggcaacggtggaacaacggacgcgggacagtaatatcagtaatgatgtaaaaaaccaggttgataatatggtcacagactatcattccgatataaacgatacttatggaaatatccagggtgaggaaaagactattgaccagcagtattctggcctgcaaaaacagtataaaacagaagcactatctcagaataataaatataatgaagaaaaggctgcacaggaaaggatgcctggcgcggatagtcctgaagaactgatgaagagggcaaaagagtatcaggataagcacaaacagtaaggcgatatccgggaggtgggaatgaaaaatttagctcagattgttctggtgacagtggtacagtttattgcctgttatctagctgagtggggagtcgctgaaacagggattatcctgttatttgtcctgctgtggcaggggctgtttatctggttatttattcaaattcgtaaaaaaaataacatatctgatgagttcaagtttagtaaaggaatttggtatgtaattatgcccgtatgctcattactctcgccattattaagtttaatgatttttatcggtggaacattatatgaattaagacgagtaagtggttgtataagcataaaagagtgggtgaaatgtcagcttgatgaccaatatgatgaagatagggggctggattttgaatctgttgagtatcgtcaaacgacttactacaacccctcaactggatatcctatgcatggaggagttgattcggctggtaatacttttgggtctcgctggcaggataataatgacaggtaataagaaaactatggttggtaaataaaggtaattggatgaaaatgaaaaaaataatgatggttacactggtcagttccactctggccctgtcagggtgtggtgcgatgagcacagcaatcaaaaagcgtaatcttgaagtgaaaacccagatgagtcagaccatctggcttgacccgtccagtgaacggacggtgtatctgcaggtgaaaaatacctccgataaggatatgagtgaccttcagagcctgattgcaaaagatattcaggcaaaagggtatactgtggttacctcaccagacaaagcatactactggattcaggccaacgtgctgaaggccgacaagatggatttgcgtgagtcccagggatggctgaaccgtggttatgaaggtgcgctctccggggcagcgctcggggccggtatcacagcgtataactctaactcagcaggtgccacgctgggagtagggcttgctgccgggcttgtggggatggccgctgatgcgatggtggaagatattaactacaccatgatcaccgacgtacagatctcagaacggacaaaagcgaccgtgacaacggacaatgttgccgccctccgccagggaacctcgggtgccaaaatccagaccagcaccgaaaccggtaatcagcataaataccagacccgtgtggtatcgaatgccaacaaggttaacctgaagtttgaagaggcaaaaccagttctggaagaacaactggccaaatcaattgcaaatattctttaatcatcttcaggaggccggtctgactggcttcctgactgacgcctcgctttgctcgttgtccaggcccggaaagaaataaaataaatttcatttctctccggcgtttccgaaataaatatgaaaacactgagcggttgtgcaaattctttgtgcgtccgtgaagtgttgccgcgaagcgggaataataaggatacggaatgccattatcagaacttctttgtcacatgactaacggcaatccgttttcctgactgtttgctgtactggtagtctgtgctgctgttctttattttctgaaaaaacgaaagtaacggttagttatttattcaaattaattccccgtccggactgataatctttctttggaataacatctatgagctttaatgcgaaggatatgacccagggcggtcagattgcgtccatgcgtattcgcatgttcagtcagatcgccaacattatattttactgcctgtttattttcttctggatactcgtcggcctagtgttatgggtgaaactcagctggcagacgtttgtgaatgggggtatctactggtggtgtaccacgcttgaaggaatgcgggatttaattaaatcccagcctgtctatgagatccggtattacggccagacgttccggatgaacgccgctcaggttctgcaggacaaatacacggtctggtgtggggagcaactgtggtcggcctttgttctggccgcctgtgtggcgctggttatctgcctgattacattttttatgaccacatggattctgggacgtcagggaaaacagcagagtgaggatgatgttaccggaggacgccaacttaccgacaatccgaaagacgttgccagaatgctgaaaaaagacggaaaagcgtccgatatcctgattggcgatttgccaatcattaaggattcagagattcagaactttttgctccacgggacagtcagtaccggtaagtctgaaatcattcgccggctggctaactatgcccgtcagcgcggcgacatggtggtgatgtacgatcgttcctgtgagtttgtcaaaagctactacgacccgtccatcgataaaattctcaacccctgtgacgcgcggtgtgccgcatgggatttatggcgggaatgcctcaccctgccggattttgataatgcggcgaataccctgatcccgatgggcacgaaggaagatccgttctggcagggttccggacggaccatttttgctgaagcggcatacctgatgcgtaatgacagcgaccgcagctacagtaagctggttgacacgctgctttcaatcaagattgaaaaactgcgaacctacctgcgtgattccccggcggccaacctggtggaagaaaaaatcgagaagacggccatttccatccgggctgtgctgaccaactacgtaaaagccgtccgctatcttcaggggatcgagcgtaacggtgaaccgttcaccatccgtgactggatgcgtggtgtacgtgaagatcagaagaatggctggctgtttatttcttcaaacgctgacacacattcttccctgaagccggtgatttccatgtggctgtccattgccatccggggcctgctggcgatgggagagaaccgtaaccgtcgggtgtggttcttctgtgatgagttgcccacgctgcacaagctgcccgacctcgtggaaattgtcccggaagcccgtaaattcgggggctgctatgtctttggtattcagtccagtacacagatggaggatatctatggcgagaaagcggcggcaaccctgctggatgtgatgaacacaagggcctttttccgctcacccagctataagattgccgactatgtcgcccatgagattggtgaaaaagagatcctgaaagccagtgagcagtattcctatggtgccgatcccgttcgtgacggggtgtcgaccggtaaagagatggagcgtgtcacactggtcagctactccgatattcagtcactgcccgacctgacctgttatgtcacgctgcccggaccctatccggcagtgaagctggccctgaaataccaggaacgtcccaaagtggcgccggagtttattccccgggaaatgaatccggaggcggaagcccgtctgagcgccgttctggctgcaagggaagccgaggtacgtcagatgtccagcctgtttgaaccggatacagaagcggttgcgccgacagcagcagaagcgcaggctgaacagccgcaacagccacagcccacggttgtcagcgataaaaaatcagcagcggcgggtaccgccgtgaatacgcctgcaggcggtgtcggacaggaactgaaaatgaagccggaagacgaagagcagccactgccccccgggattaatgcgtccggtgaggtggtggacatggcggcgtatgagcgctggcggcaggagcaggaggtgaatactcagcagcagatgcaacggcgggaggaggtgaatatcaacgttcaccgtgggcacggaaaggatgaaccggagccgggagatgatttctgatggcggtatcagctccagtcctcagttctcagtccacccacacgttcaaactcccgggtgttgttcgtgacaacaatcagtccccggctgcgtgcgtgaccggcaatcatctgatcgaatggcccgacagggcgtccctgacgggcaagctctgccctgatctgccccgtatgggtggcggccggcgtgtcataatccagaacatcaagtcgggaaacaaacccctctatcacagcgagatttctttcgggcatctggcttttttcggcgccgtaaatcagctccatcagggtgaccgagctgatacacattctcccctggttcaggttaaaacgctccctgacgctggcaggtttgttttttatcgtgaaaatgcagatgttagtatccagcataaacttcagcatcagaatgattcccgttcctgcacagagggttgttcccggttatccataaaatcggcgctgacgttgttcccgtcgaaccattcatcccacgattctccggccggcgtgataattcgggttcgcccgacagcgataacttccacacgttttacattttccggcaaagccactgcttttggcagtctgaccgcctggctgcggttactgagaaatacgctggtttccatcatgtgcctccttacagggatatgtcttacgtatatccattatggtttttgtgatgggatatgtcaaagggatatacatttatgatgagtattgcgcaggtccggtcggcgggaagtgccgccggttattacagcgacagggataactactacgtgctgggcagcatggaagagcgctgggccggaaaaggcgcggagcagctggggttgcagggcaccgtcgataaggaggtgttcacccgggtactggaaggcagactgcccgacggggctgatctgagccggcagcaggatggcggcaacaaacaccgccccggctatgatctgaccttctctgcccccaaaagtgtttccctgatggccatgctggccggtgataaacgcctgactgaggcacacaaccaggcggtggatatcgctgtccgtcaggtggaggcgctggcctccaccagggtgatgacggacggacagtcagaaacggtgctcaccggtaatctggtgatggcgctgttcaatcatgacaccagtcgtgaccaggagccgcagttgcatacccatgctgtggtggtcaacgtcacgcagcatgacggggaatggaagaccctgagcagcgataaggtgggcaaaacgggatttatcgagaatgtctatgctaaccagatagccttcgggaagatttaccgcgcggtgctgaaagagaaggttgaagcgctgggctatgaaacggaagtggtcggtaagcacggtatgtgggagatgcccggtgtcccggtggaggccttttccagccgttcgcaggccatccgagaggcggtcggggaggatgcctcgctgaaatcccgggatgtggcggcgctggatacgcgtaaatccaaacagcatgtcgatccggaagtgaaaatggctgagtggatgcagaccctgaaagataccgggtttgatatcagcgcataccgtgagtctgcggacaggcgggcggaaatacaggcagcacagcctgttccgtcacaggagcagccggatattcagcaggcggtgacgcaggccattgccggattaagcgaccggaaggttcagtttacgtataccgacgtgctggccagaacggtcggcatgctgccgccggaagccggcgtgattgagaaagcccgggccgggattgatgaggccatcagccgcgagcagcttatccccctcgaccgggagaaaggactgttcacctccggtattcatgtgctcgatgagctgtctgtccgggcactcagcagcgatatcatgaagcagaaccgggtgaccgtccatccggagaagagcgtgccccgcacgggaagttacagcgacgcggtgagtgtcctggctcaggaccgcccgtcactggccattatcagtggtcagggcggtgctgccggtcagcgggagcgggtggcggaactgacgatgatggcccgggagcaggggcgtgaggtgcagattattgtcgctgaccgccgttcgcagacaaacctgaagcaggatgaacgtctgtccggtgagctgataaccgggcgtcgtcagttgcaggagggcatgttattttccccgggcagtaccgttattgtcgaccagggggaaaagctgtccctgaaggagactctgaccctgctggatggcgcggcgcgtcataacgtccaggtgctaattaccgacagcggtcagcgcaccggtaccggcagcgcgctgatggccatgaaggaggccggcgtgaacagttaccgctggcagggcaggcagcagaccccggcgaccgttatcagcgagccggaccggaatgtccgctatgcccggctggccggggattttgtggctgcggtgaaagccggggaagagagcgtggcacaggtcagcggcatgcgtgaacaggccatactggcggggatgatacgcagtgagctgaagacgcaggggatactcgggcagcaggacaccatgatgaccgccctgtcaccggtctggctggacagccggaaccgttacctgcgcgatatgtaccgtgaagggatggtgatggagcagtggaacccggagaaacggtcccatgaccggtatgtgattgaccgggtgaccgcacaaagtcacagtctgaccctgcgggatgcgcagggagagacgcagatggtgcggatttcagccctggacagcagttggtcactcttccgaccggagaagatgccggtggcagacggtgagcgtcttatggtgacgggaaaaattcccgggcttcgcgtctccgtcggcgaccggctgcaggtatctgcggtgaacgatggcgtgatgacggtgacggtacccggcagggctgaaccggcttccctgccggtgggggattccccgttcacggcgctgaagctggaaaacggctgggtggaaacacccgggcattccgtcagtgacagtgcgaaagtttttgcttccgtcacacagatggcgatggacaacgccaccctgaacagtctggcccgcagcggccgggatgtccggctgtattcctcactggatgagacccgcactgctgaaaaactctcccgtcacccgtcttttacggtcgtttctgagcagataaaggcgcgtgccggtgaggtatcgctggaaaccgccatcagccgccagaaagccgggcttcacacgccggcacagcaggccattcaccttgcccttccggtggtggaaagtaaaaacctggcattcagtcaggtggacctgctgacggaggcgaagtcgtttgctgcagagggaaccggttttgctgacctgggacgggaaattgatgcgcagataaaacggggcgatttactgtatgtggatgtggcaaaaggttatggcacagacctgctgatttcccgtgcgtcgtatgacgctgaaaagagtattctgcatcatatccttgagggcaaggaggcggtcacgccactgatggagagggtacccggcgaactcatggagactctgacatccggacagcgtgccgccacccgtatgatactcgaaacgaaagaccgtttcaccgtggtacagggttatgccggggtgggcaagaccacccagttccgggcggtgatgtcagcggtgaacctgctgccggagagtgagcgtccccgcgtcgtggggctgggaccgacccacagggcggtcggggagatgcgcagtgccggcgtggaagcacagacgctggcgtcctttctgcacgacacgcaactgcagcagcgcagcggtgaaacgccggatttcagcaacacgctgttcctccttgatgagagttcgatggtgggcaacaccgatatggcgcgggcatacgccctgattgcggccggtggtggtcgtgccgtggcgagcggtgacacggaccagctgcaggccatcgcacccggccagcctttccgcctgcagcagacgcgcagcgcggctgatgtggccatcatgaaggagattgtacgccagacaccggaactgcgggacgccgtgtacagcctgattaaccgggatgtgaataaggcactgtccgggcttgaaaacgtgaagccggttcaggttccccgcctgaagggggcatgggcgccggaaaactcggtgacggagttcagccgtctgcaggagcgggaactggcgaaagccgcacaggaggcggagaaaaagggcgaagcctttccggatgtgcccgtgacgctgtatgaggccattgtccgcgactataccggcagaacgccggaagcccgggagcagacgctgattgtcacgcatctgaatgaggaccgtcgggtgctgaacagcatgattcaggatgcgctggcgaaaccgggtgagcagcaggtcactgtccctgtactgaccaccgcgaatatccgtgacggggaactgcgccgtctgtccacctgggaggcgcatccgggggcgctggccctggtggataatgtgtatcaccggattgccggtatcagtaaggaggacgggctgattaccctggaagataaggcgggtaacacccgccttatttccccccgggaagcagcggcagagggcgtcacactatacaatccggaaactatccgggtgggggccggtgaccggatgcgtttcacgaagagtgacagggaacgcgggtatgtggccaacagcgtctggacggtgacggcggtttccggtgacagcgtcacgctgtcagacgggaaacagacccgcgtggtgcgtcccgggcaggacagggcagagcaacatattgacctggcgtatgccatcaccgcccacagtgcgcagggggccagtgagacgtttgccattgcgctggagggaaccgaagggggccggaaacagatggccggttttgagtcggcgtatgtggcgctgtcgcgtatgaagcagcatgtgcaggtgtacaccgacgaccgtcagggttgggttaaggccatcaacagtgcggagcaaaagggcacggcccatgacgtgctggagcctaaatcagagcgtgagatgatgaacgcagagcgcctgttcagcaccgcccgggaactgcgggacgtggccgccggccgtgccgtgctgcgcaacgccggactggcgcagggagacagccgggcgcgttttattgcaccggggcgcaagtatccgcagccgtatgtggcgctgccggcgtttgaccgtaacggtaaatccgccggtatctggctgaacccgctgacaacggatgacggtgccgggctgcggggattcaccggggaaggtcgggtgaaaggcagtgaagaggcgcagtttgtggccctgcagggcagtcgtaacggcgaaagcctgctggctggtagcatgcaggatggcgtccggattgcccgggagaaccccgacagcggcgtggtggtgcgaattgtcggtgacgggcgtccatggaatcccgtcgccattaccggcggcagggtgtggggcgatattcctgacagtaacgtgcagcccggcgcggggaacggggagccggtcacggcagagattctggcacagcggcaggcagaagaggcagtccgccgtgaaacagaacgccgtgcggatgagattgtccgtaaaatggctgaggacaaatctgacctgccggaggagaaaaccgcgcaggcggtcagggagattgccggccaggagcaggacagaatgaccccgcctgaacgggaacccccgctgccggagagtgtgctgcgcgaaccacaaagggagcgggagaccatccgggaagtggcgcgggaaaaccggggccgggagcggctgcagcagatggagcaggagatggtgcgtgacctgcagaaagagaaaacccctggcggggactgatacgggaagataaaccacgatgacgatggataacgccacacgtaacgattcgcgggcagtccgggtggatacccggctgcagcgactgctggcctggtcgccgggacagagagatctcatcaaaaccgtggcgctgctgctgatggtggctgaccatattaaccgtatcctgcacctgaaccaagagtggctgtttctggccgggcgcggggcgtttccgctgtttgccctggtgtgggggctgaacctgtcccagcatacgcatatccgccagtctgcgattaaccggctgtggggatgggcggttatcgcgcagtccggatattttctggcgggatttccgtggtatgaagggaatattctgtttgcctttgcggtgaccgcgcaggcgctgaagtggtgtgagcagcgctgcctgtttcactctgcggccgcgctgttactgctgacggcgtggatacccctgtccggaaccagctacggcgttgccggcgtgctggtgctggtcatctgttaccggctgtaccggaccacagatactgaagaacatctggcgcttgcggcctgcctagtggtggccgtccccgcgctgaatctggtcaccagtgatgccgcggcggtggcaggacttctggtgaccgggctgacggtatggcttgtttcgctgacaggcaaatcacggccccggttctggccggctgattttttcccggtattctacacctgccatctggctgccctgggcgttctggcgatgtgacgggtgtggtatctttggcggtatgagcaggatttggcaggggcagcatacagcatgactgagcagaaacgaccggtactgacactgaaacggaaaacggatggggaagcgccggcccgcagccgcaaaaccattattaacgtcaccacgcccccgaagtggaaggtgaagaaacagcagctggctgacagggctgtccgggaagcgtcactggcagaaaaaaaagcccgggcaagaaaagatctgtccatctacctgcgatttcagtcagtggaggaagcggtcagcacgctgaaaccctggtggccggggctgtttgacggcgacacgccccgtcttttcgcctgtggcgtgcgtgaggcgctgtttgaggacgcctccaggcgtggtatcccgctgtcacacaaaaagataatccgtgcgctgaaagcgattgcccgttctgaagcatatctcagcgcgatgaaagccggggcctgccgatatgacacggaagggtatgtgacggagcatattaccgtggaggaagaacagtacgcgctggcgcgactggcaaaggtccgggcgcagaacgccagaaaagcggaactccgcgcggtgctggcgcagacggtctgaaccggagaagcccagtataat
